United States Patent Application Publication US 2025/0235561 A1 - sequence listing, part 3

SEQ ID NO: 44645 - DNA, 22 bp, synthetic construct
  misc_feature 1..22: note = chemically synthesized
  source 1..22: mol_type = other DNA
aacttgagactccatttccctt

SEQ ID NO: 44646 - DNA, 22 bp, synthetic construct
  misc_feature 1..22: note = chemically synthesized
  source 1..22: mol_type = other DNA
gagactccatttccctttcaaa

SEQ ID NO: 44647 - DNA, 22 bp, synthetic construct
  misc_feature 1..22: note = chemically synthesized
  source 1..22: mol_type = other DNA
agactccatttccctttcaaac

SEQ ID NO: 44648 - DNA, 22 bp, synthetic construct
  misc_feature 1..22: note = chemically synthesized
  source 1..22: mol_type = other DNA
catttccctttcaaactctggg

SEQ ID NO: 44649 - DNA, 22 bp, synthetic construct
  misc_feature 1..22: note = chemically synthesized
  source 1..22: mol_type = other DNA
ccctttcaaactctgggaaaaa

SEQ ID NO: 44650 - DNA, 22 bp, synthetic construct
  misc_feature 1..22: note = chemically synthesized
  source 1..22: mol_type = other DNA
cctttcaaactctgggaaaaaa

SEQ ID NO: 44651 - DNA, 22 bp, synthetic construct
  misc_feature 1..22: note = chemically synthesized
  source 1..22: mol_type = other DNA
tcaaactctgggaaaaaaaaga

SEQ ID NO: 44652 - DNA, 22 bp, synthetic construct
  misc_feature 1..22: note = chemically synthesized
  source 1..22: mol_type = other DNA
caaactctgggaaaaaaaagaa

SEQ ID NO: 44653 - DNA, 22 bp, synthetic construct
  misc_feature 1..22: note = chemically synthesized
  source 1..22: mol_type = other DNA
aaactctgggaaaaaaaagaaa

SEQ ID NO: 44654 - DNA, 22 bp, synthetic construct
  misc_feature 1..22: note = chemically synthesized
  source 1..22: mol_type = other DNA
tgggaaaaaaaagaaaaagcat

SEQ ID NO: 44655 - DNA, 22 bp, synthetic construct
  misc_feature 1..22: note = chemically synthesized
  source 1..22: mol_type = other DNA
ggaaaaaaaagaaaaagcatct

SEQ ID NO: 44656 - DNA, 22 bp, synthetic construct
  misc_feature 1..22: note = chemically synthesized
  source 1..22: mol_type = other DNA
tgaagaggtgtgtgggtccaac

SEQ ID NO: 44657 - DNA, 22 bp, synthetic construct
  misc_feature 1..22: note = chemically synthesized
  source 1..22: mol_type = other DNA
acagcaaaaccctctccaaact

SEQ ID NO: 44658 - DNA, 22 bp, synthetic construct
  misc_feature 1..22: note = chemically synthesized
  source 1..22: mol_type = other DNA
tccaaactagccttgctgtagg

SEQ ID NO: 44659 - DNA, 22 bp, synthetic construct
  misc_feature 1..22: note = chemically synthesized
  source 1..22: mol_type = other DNA
caaactagccttgctgtaggca

SEQ ID NO: 44660 - DNA, 22 bp, synthetic construct
  misc_feature 1..22: note = chemically synthesized
  source 1..22: mol_type = other DNA
gccttgctgtaggcagaagcct

SEQ ID NO: 44661 - DNA, 22 bp, synthetic construct
  misc_feature 1..22: note = chemically synthesized
  source 1..22: mol_type = other DNA
gctgtaggcagaagcctctgct

SEQ ID NO: 44662 - DNA, 22 bp, synthetic construct
  misc_feature 1..22: note = chemically synthesized
  source 1..22: mol_type = other DNA
ctgtaggcagaagcctctgcta

SEQ ID NO: 44663 - DNA, 22 bp, synthetic construct
  misc_feature 1..22: note = chemically synthesized
  source 1..22: mol_type = other DNA
taggcagaagcctctgctatct

SEQ ID NO: 44664 - DNA, 22 bp, synthetic construct
  misc_feature 1..22: note = chemically synthesized
  source 1..22: mol_type = other DNA
tgctatctgcctcatctatgga

SEQ ID NO: 44665 - DNA, 22 bp, synthetic construct
  misc_feature 1..22: note = chemically synthesized
  source 1..22: mol_type = other DNA
ctatctgcctcatctatggaac

SEQ ID NO: 44666 - DNA, 22 bp, synthetic construct
  misc_feature 1..22: note = chemically synthesized
  source 1..22: mol_type = other DNA
tctgcctcatctatggaacaca

SEQ ID NO: 44667 - DNA, 22 bp, synthetic construct
  misc_feature 1..22: note = chemically synthesized
  source 1..22: mol_type = other DNA
cctcatctatggaacacatcta

SEQ ID NO: 44668 - DNA, 22 bp, synthetic construct
  misc_feature 1..22: note = chemically synthesized
  source 1..22: mol_type = other DNA
atctatggaacacatctatatt

SEQ ID NO: 44669 - DNA, 22 bp, synthetic construct
  misc_feature 1..22: note = chemically synthesized
  source 1..22: mol_type = other DNA
tggaacacatctatatttgtgc

SEQ ID NO: 44670 - DNA, 22 bp, synthetic construct
  misc_feature 1..22: note = chemically synthesized
  source 1..22: mol_type = other DNA
tatttgtgcgaatgcatgaaaa

SEQ ID NO: 44671 - DNA, 22 bp, synthetic construct
  misc_feature 1..22: note = chemically synthesized
  source 1..22: mol_type = other DNA
gtgcgaatgcatgaaaataaag

SEQ ID NO: 44672 - DNA, 22 bp, synthetic construct
  misc_feature 1..22: note = chemically synthesized
  source 1..22: mol_type = other DNA
tgcgaatgcatgaaaataaagt

SEQ ID NO: 44673 - DNA, 22 bp, synthetic construct
  misc_feature 1..22: note = chemically synthesized
  source 1..22: mol_type = other DNA
aaagatatgggtggccttcagg

SEQ ID NO: 44674 - DNA, 22 bp, synthetic construct
  misc_feature 1..22: note = chemically synthesized
  source 1..22: mol_type = other DNA
aagatatgggtggccttcagga

SEQ ID NO: 44675 - DNA, 22 bp, synthetic construct
  misc_feature 1..22: note = chemically synthesized
  source 1..22: mol_type = other DNA
caggagacacgccagcccagca

SEQ ID NO: 44676 - DNA, 22 bp, synthetic construct
  misc_feature 1..22: note = chemically synthesized
  source 1..22: mol_type = other DNA
aggagacacgccagcccagcat

SEQ ID NO: 44677 - DNA, 22 bp, synthetic construct
  misc_feature 1..22: note = chemically synthesized
  source 1..22: mol_type = other DNA
ttcacaatgacacaatggaacc

SEQ ID NO: 44678 - DNA, 22 bp, synthetic construct
  misc_feature 1..22: note = chemically synthesized
  source 1..22: mol_type = other DNA
tcacaatgacacaatggaacct

SEQ ID NO: 44679 - DNA, 22 bp, synthetic construct
  misc_feature 1..22: note = chemically synthesized
  source 1..22: mol_type = other DNA
cacaatgacacaatggaaccta

SEQ ID NO: 44680 - DNA, 22 bp, synthetic construct
  misc_feature 1..22: note = chemically synthesized
  source 1..22: mol_type = other DNA
acaatgacacaatggaacctac

SEQ ID NO: 44681 - DNA, 22 bp, synthetic construct
  misc_feature 1..22: note = chemically synthesized
  source 1..22: mol_type = other DNA
ctctgattgccatctcttcact

SEQ ID NO: 44682 - DNA, 22 bp, synthetic construct
  misc_feature 1..22: note = chemically synthesized
  source 1..22: mol_type = other DNA
tgattgccatctcttcacttta

SEQ ID NO: 44683 - DNA, 22 bp, synthetic construct
  misc_feature 1..22: note = chemically synthesized
  source 1..22: mol_type = other DNA
attgccatctcttcactttaca

SEQ ID NO: 44684 - DNA, 22 bp, synthetic construct
  misc_feature 1..22: note = chemically synthesized
  source 1..22: mol_type = other DNA
ccatctcttcactttacaccca

SEQ ID NO: 44685 - DNA, 22 bp, synthetic construct
  misc_feature 1..22: note = chemically synthesized
  source 1..22: mol_type = other DNA
ttcactttacacccagaggaaa

SEQ ID NO: 44686 - DNA, 22 bp, synthetic construct
  misc_feature 1..22: note = chemically synthesized
  source 1..22: mol_type = other DNA
cactttacacccagaggaaaaa

SEQ ID NO: 44687 - DNA, 22 bp, synthetic construct
  misc_feature 1..22: note = chemically synthesized
  source 1..22: mol_type = other DNA
actttacacccagaggaaaaaa

SEQ ID NO: 44688 - DNA, 22 bp, synthetic construct
  misc_feature 1..22: note = chemically synthesized
  source 1..22: mol_type = other DNA
tacacccagaggaaaaaaaaag

SEQ ID NO: 44689 - DNA, 22 bp, synthetic construct
  misc_feature 1..22: note = chemically synthesized
  source 1..22: mol_type = other DNA
acacccagaggaaaaaaaaagt

SEQ ID NO: 44690 - DNA, 22 bp, synthetic construct
  misc_feature 1..22: note = chemically synthesized
  source 1..22: mol_type = other DNA
cacccagaggaaaaaaaaagtt

SEQ ID NO: 44691 - DNA, 22 bp, synthetic construct
  misc_feature 1..22: note = chemically synthesized
  source 1..22: mol_type = other DNA
aagggtttctcaaccaggtaag

SEQ ID NO: 44692 - DNA, 22 bp, synthetic construct
  misc_feature 1..22: note = chemically synthesized
  source 1..22: mol_type = other DNA
ctcaaccaggtaagtcatggag

SEQ ID NO: 44693 - DNA, 22 bp, synthetic construct
  misc_feature 1..22: note = chemically synthesized
  source 1..22: mol_type = other DNA
tcaaccaggtaagtcatggaga

SEQ ID NO: 44694 - DNA, 22 bp, synthetic construct
  misc_feature 1..22: note = chemically synthesized
  source 1..22: mol_type = other DNA
aaccaggtaagtcatggagagc

SEQ ID NO: 44695 - DNA, 22 bp, synthetic construct
  misc_feature 1..22: note = chemically synthesized
  source 1..22: mol_type = other DNA
aaacttactcttgcaacactca

SEQ ID NO: 44696 - DNA, 22 bp, synthetic construct
  misc_feature 1..22: note = chemically synthesized
  source 1..22: mol_type = other DNA
actcttgcaacactcaacacac

SEQ ID NO: 44697 - DNA, 22 bp, synthetic construct
  misc_feature 1..22: note = chemically synthesized
  source 1..22: mol_type = other DNA
ctcttgcaacactcaacacact

SEQ ID NO: 44698 - DNA, 22 bp, synthetic construct
  misc_feature 1..22: note = chemically synthesized
  source 1..22: mol_type = other DNA
ttgcaacactcaacacacttgt

SEQ ID NO: 44699 - DNA, 22 bp, synthetic construct
  misc_feature 1..22: note = chemically synthesized
  source 1..22: mol_type = other DNA
gcaacactcaacacacttgtga

SEQ ID NO: 44700 - DNA, 22 bp, synthetic construct
  misc_feature 1..22: note = chemically synthesized
  source 1..22: mol_type = other DNA
caacactcaacacacttgtgag

SEQ ID NO: 44701 - DNA, 22 bp, synthetic construct
  misc_feature 1..22: note = chemically synthesized
  source 1..22: mol_type = other DNA
aacacacttgtgagttcttgtg

SEQ ID NO: 44702 - DNA, 22 bp, synthetic construct
  misc_feature 1..22: note = chemically synthesized
  source 1..22: mol_type = other DNA
gtgagttcttgtgcactgtctg

SEQ ID NO: 44703 - DNA, 22 bp, synthetic construct
  misc_feature 1..22: note = chemically synthesized
  source 1..22: mol_type = other DNA
tgagttcttgtgcactgtctgg

SEQ ID NO: 44704 - DNA, 22 bp, synthetic construct
  misc_feature 1..22: note = chemically synthesized
  source 1..22: mol_type = other DNA
ttgtgcactgtctggctttttt

SEQ ID NO: 44705 - DNA, 22 bp, synthetic construct
  misc_feature 1..22: note = chemically synthesized
  source 1..22: mol_type = other DNA
gtgcactgtctggcttttttgc

SEQ ID NO: 44706 - DNA, 22 bp, synthetic construct
  misc_feature 1..22: note = chemically synthesized
  source 1..22: mol_type = other DNA
tgcactgtctggcttttttgct

SEQ ID NO: 44707 - DNA, 22 bp, synthetic construct
  misc_feature 1..22: note = chemically synthesized
  source 1..22: mol_type = other DNA
tctggcttttttgctagcctat

SEQ ID NO: 44708 - DNA, 22 bp, synthetic construct
  misc_feature 1..22: note = chemically synthesized
  source 1..22: mol_type = other DNA
gcttttttgctagcctataagc

SEQ ID NO: 44709 - DNA, 22 bp, synthetic construct
  misc_feature 1..22: note = chemically synthesized
  source 1..22: mol_type = other DNA
ttttgctagcctataagctgca

SEQ ID NO: 44710 - DNA, 22 bp, synthetic construct
  misc_feature 1..22: note = chemically synthesized
  source 1..22: mol_type = other DNA
tttgctagcctataagctgcat

SEQ ID NO: 44711 - DNA, 22 bp, synthetic construct
  misc_feature 1..22: note = chemically synthesized
  source 1..22: mol_type = other DNA
ttgctagcctataagctgcatg

SEQ ID NO: 44712 - DNA, 22 bp, synthetic construct
  misc_feature 1..22: note = chemically synthesized
  source 1..22: mol_type = other DNA
tgctagcctataagctgcatga

SEQ ID NO: 44713 - DNA, 22 bp, synthetic construct
  misc_feature 1..22: note = chemically synthesized
  source 1..22: mol_type = other DNA
gctagcctataagctgcatgaa

SEQ ID NO: 44714 - DNA, 22 bp, synthetic construct
  misc_feature 1..22: note = chemically synthesized
  source 1..22: mol_type = other DNA
ctagcctataagctgcatgaag

SEQ ID NO: 44715 - DNA, 22 bp, synthetic construct
  misc_feature 1..22: note = chemically synthesized
  source 1..22: mol_type = other DNA
gcctataagctgcatgaaggct

SEQ ID NO: 44716 - DNA, 22 bp, synthetic construct
  misc_feature 1..22: note = chemically synthesized
  source 1..22: mol_type = other DNA
taagctgcatgaaggctgagac

SEQ ID NO: 44717 - DNA, 22 bp, synthetic construct
  misc_feature 1..22: note = chemically synthesized
  source 1..22: mol_type = other DNA
catgaaggctgagactatggca

SEQ ID NO: 44718 - DNA, 22 bp, synthetic construct
  misc_feature 1..22: note = chemically synthesized
  source 1..22: mol_type = other DNA
agactatggcagtcttggctca

SEQ ID NO: 44719 - DNA, 22 bp, synthetic construct
  misc_feature 1..22: note = chemically synthesized
  source 1..22: mol_type = other DNA
tggcagtcttggctcatagaag

SEQ ID NO: 44720 - DNA, 22 bp, synthetic construct
  misc_feature 1..22: note = chemically synthesized
  source 1..22: mol_type = other DNA
ggctcatagaaggtaatcagtg

SEQ ID NO: 44721 - DNA, 22 bp, synthetic construct
  misc_feature 1..22: note = chemically synthesized
  source 1..22: mol_type = other DNA
gctcatagaaggtaatcagtgg

SEQ ID NO: 44722 - DNA, 22 bp, synthetic construct
  misc_feature 1..22: note = chemically synthesized
  source 1..22: mol_type = other DNA
atagaaggtaatcagtggaaat

SEQ ID NO: 44723 - DNA, 22 bp, synthetic construct
  misc_feature 1..22: note = chemically synthesized
  source 1..22: mol_type = other DNA
gtcgattgattgaatttttccc

SEQ ID NO: 44724 - DNA, 22 bp, synthetic construct
  misc_feature 1..22: note = chemically synthesized
  source 1..22: mol_type = other DNA
tcgattgattgaatttttccct

SEQ ID NO: 44725 - DNA, 22 bp, synthetic construct
  misc_feature 1..22: note = chemically synthesized
  source 1..22: mol_type = other DNA
attgaatttttcccttaaagcc

SEQ ID NO: 44726 - DNA, 22 bp, synthetic construct
  misc_feature 1..22: note = chemically synthesized
  source 1..22: mol_type = other DNA
aatttttcccttaaagccaatt

SEQ ID NO: 44727 - DNA, 22 bp, synthetic construct
  misc_feature 1..22: note = chemically synthesized
  source 1..22: mol_type = other DNA
ttcccttaaagccaattctaat

SEQ ID NO: 44728 - DNA, 22 bp, synthetic construct
  misc_feature 1..22: note = chemically synthesized
  source 1..22: mol_type = other DNA
tcccttaaagccaattctaatg

SEQ ID NO: 44729 - DNA, 22 bp, synthetic construct
  misc_feature 1..22: note = chemically synthesized
  source 1..22: mol_type = other DNA
cccttaaagccaattctaatgt

SEQ ID NO: 44730 - DNA, 22 bp, synthetic construct
  misc_feature 1..22: note = chemically synthesized
  source 1..22: mol_type = other DNA
ccttaaagccaattctaatgta

SEQ ID NO: 44731 - DNA, 22 bp, synthetic construct
  misc_feature 1..22: note = chemically synthesized
  source 1..22: mol_type = other DNA
aaagccaattctaatgtaagtg

SEQ ID NO: 44732 - DNA, 22 bp, synthetic construct
  misc_feature 1..22: note = chemically synthesized
  source 1..22: mol_type = other DNA
aagccaattctaatgtaagtgt

SEQ ID NO: 44733 - DNA, 22 bp, synthetic construct
  misc_feature 1..22: note = chemically synthesized
  source 1..22: mol_type = other DNA
taatgtaagtgtatgtgtgctg

SEQ ID NO: 44734 - DNA, 22 bp, synthetic construct
  misc_feature 1..22: note = chemically synthesized
  source 1..22: mol_type = other DNA
atgtaagtgtatgtgtgctgct

SEQ ID NO: 44735 - DNA, 22 bp, synthetic construct
  misc_feature 1..22: note = chemically synthesized
  source 1..22: mol_type = other DNA
ctgtaaatagggttagaaccct

SEQ ID NO: 44736 - DNA, 22 bp, synthetic construct
  misc_feature 1..22: note = chemically synthesized
  source 1..22: mol_type = other DNA
taaatagggttagaaccctttt

SEQ ID NO: 44737 - DNA, 22 bp, synthetic construct
  misc_feature 1..22: note = chemically synthesized
  source 1..22: mol_type = other DNA
gaaccctttttgctctaactta

SEQ ID NO: 44738 - DNA, 22 bp, synthetic construct
  misc_feature 1..22: note = chemically synthesized
  source 1..22: mol_type = other DNA
tttgctctaacttaaataccaa

SEQ ID NO: 44739 - DNA, 22 bp, synthetic construct
  misc_feature 1..22: note = chemically synthesized
  source 1..22: mol_type = other DNA
ttgctctaacttaaataccaat

SEQ ID NO: 44740 - DNA, 22 bp, synthetic construct
  misc_feature 1..22: note = chemically synthesized
  source 1..22: mol_type = other DNA
tgctctaacttaaataccaatt

SEQ ID NO: 44741 - DNA, 22 bp, synthetic construct
  misc_feature 1..22: note = chemically synthesized
  source 1..22: mol_type = other DNA
gctctaacttaaataccaattg

SEQ ID NO: 44742 - DNA, 22 bp, synthetic construct
  misc_feature 1..22: note = chemically synthesized
  source 1..22: mol_type = other DNA
ctctaacttaaataccaattga

SEQ ID NO: 44743 - DNA, 22 bp, synthetic construct
  misc_feature 1..22: note = chemically synthesized
  source 1..22: mol_type = other DNA
taacttaaataccaattgattt

SEQ ID NO: 44744 - DNA, 22 bp, synthetic construct
  misc_feature 1..22: note = chemically synthesized
  source 1..22: mol_type = other DNA
acttaaataccaattgatttta

SEQ ID NO: 44745 - DNA, 22 bp, synthetic construct
  misc_feature 1..22: note = chemically synthesized
  source 1..22: mol_type = other DNA
aaataccaattgattttagccc

SEQ ID NO: 44746 - DNA, 22 bp, synthetic construct
  misc_feature 1..22: note = chemically synthesized
  source 1..22: mol_type = other DNA
aataccaattgattttagccca

SEQ ID NO: 44747 - DNA, 22 bp, synthetic construct
  misc_feature 1..22: note = chemically synthesized
  source 1..22: mol_type = other DNA
attttagcccaggataatgaaa

SEQ ID NO: 44748 - DNA, 22 bp, synthetic construct
  misc_feature 1..22: note = chemically synthesized
  source 1..22: mol_type = other DNA
tagcccaggataatgaaaatgc

SEQ ID NO: 44749 - DNA, 22 bp, synthetic construct
  misc_feature 1..22: note = chemically synthesized
  source 1..22: mol_type = other DNA
agcccaggataatgaaaatgca

SEQ ID NO: 44750 - DNA, 22 bp, synthetic construct
  misc_feature 1..22: note = chemically synthesized
  source 1..22: mol_type = other DNA
gcccaggataatgaaaatgcag

SEQ ID NO: 44751 - DNA, 22 bp, synthetic construct
  misc_feature 1..22: note = chemically synthesized
  source 1..22: mol_type = other DNA
gctcagcaagcgaaatgtaacc

SEQ ID NO: 44752 - DNA, 22 bp, synthetic construct
  misc_feature 1..22: note = chemically synthesized
  source 1..22: mol_type = other DNA
ctcagcaagcgaaatgtaacca

SEQ ID NO: 44753 - DNA, 22 bp, synthetic construct
  misc_feature 1..22: note = chemically synthesized
  source 1..22: mol_type = other DNA
agcaagcgaaatgtaaccatct

SEQ ID NO: 44754 - DNA, 22 bp, synthetic construct
  misc_feature 1..22: note = chemically synthesized
  source 1..22: mol_type = other DNA
aacacagctccttaagagatat

SEQ ID NO: 44755 - DNA, 22 bp, synthetic construct
  misc_feature 1..22: note = chemically synthesized
  source 1..22: mol_type = other DNA
cttaagagatataagaagggtg

SEQ ID NO: 44756 - DNA, 22 bp, synthetic construct
  misc_feature 1..22: note = chemically synthesized
  source 1..22: mol_type = other DNA
aagagatataagaagggtggaa

SEQ ID NO: 44757 - DNA, 22 bp, synthetic construct
  misc_feature 1..22: note = chemically synthesized
  source 1..22: mol_type = other DNA
agagatataagaagggtggaag

SEQ ID NO: 44758 - DNA, 22 bp, synthetic construct
  misc_feature 1..22: note = chemically synthesized
  source 1..22: mol_type = other DNA
cagagttctcagttgttgcggg

SEQ ID NO: 44759 - DNA, 22 bp, synthetic construct
  misc_feature 1..22: note = chemically synthesized
  source 1..22: mol_type = other DNA
tcagttgttgcgggaagtctgg

SEQ ID NO: 44760 - DNA, 22 bp, synthetic construct
  misc_feature 1..22: note = chemically synthesized
  source 1..22: mol_type = other DNA
agttgttgcgggaagtctggga

SEQ ID NO: 44761 - DNA, 22 bp, synthetic construct
  misc_feature 1..22: note = chemically synthesized
  source 1..22: mol_type = other DNA
ttgcgggaagtctgggactcca

SEQ ID NO: 44762 - DNA, 22 bp, synthetic construct
  misc_feature 1..22: note = chemically synthesized
  source 1..22: mol_type = other DNA
cgggaagtctgggactccaaac

SEQ ID NO: 44763 - DNA, 22 bp, synthetic construct
  misc_feature 1..22: note = chemically synthesized
  source 1..22: mol_type = other DNA
ggactccaaacggagggatcag

SEQ ID NO: 44764 - DNA, 22 bp, synthetic construct
  misc_feature 1..22: note = chemically synthesized
  source 1..22: mol_type = other DNA
caaacggagggatcagctgaag

SEQ ID NO: 44765 - DNA, 22 bp, synthetic construct
  misc_feature 1..22: note = chemically synthesized
  source 1..22: mol_type = other DNA
aagccatggcagaagttcgtgg

SEQ ID NO: 44766 - DNA, 22 bp, synthetic construct
  misc_feature 1..22: note = chemically synthesized
  source 1..22: mol_type = other DNA
gtggattgtgaagatttcatgg

SEQ ID NO: 44767 - DNA, 22 bp, synthetic construct
  misc_feature 1..22: note = chemically synthesized
  source 1..22: mol_type = other DNA
tgaagatttcatggacatttat

SEQ ID NO: 44768 - DNA, 22 bp, synthetic construct
  misc_feature 1..22: note = chemically synthesized
  source 1..22: mol_type = other DNA
catggacatttattagttcccc

SEQ ID NO: 44769 - DNA, 22 bp, synthetic construct
  misc_feature 1..22: note = chemically synthesized
  source 1..22: mol_type = other DNA
atggacatttattagttcccca

SEQ ID NO: 44770 - DNA, 22 bp, synthetic construct
  misc_feature 1..22: note = chemically synthesized
  source 1..22: mol_type = other DNA
attagttccccaaattaatact

SEQ ID NO: 44771 - DNA, 22 bp, synthetic construct
  misc_feature 1..22: note = chemically synthesized
  source 1..22: mol_type = other DNA
ttagttccccaaattaatactt

SEQ ID NO: 44772 - DNA, 22 bp, synthetic construct
  misc_feature 1..22: note = chemically synthesized
  source 1..22: mol_type = other DNA
gttccccaaattaatacttttg

SEQ ID NO: 44773 - DNA, 22 bp, synthetic construct
  misc_feature 1..22: note = chemically synthesized
  source 1..22: mol_type = other DNA
cccaaattaatacttttgtaat

SEQ ID NO: 44774 - DNA, 22 bp, synthetic construct
  misc_feature 1..22: note = chemically synthesized
  source 1..22: mol_type = other DNA
atacttttgtaatttcttatgc

SEQ ID NO: 44775 - DNA, 22 bp, synthetic construct
  misc_feature 1..22: note = chemically synthesized
  source 1..22: mol_type = other DNA
ttgtaatttcttatgcctgtct

SEQ ID NO: 44776 - DNA, 22 bp, synthetic construct
  misc_feature 1..22: note = chemically synthesized
  source 1..22: mol_type = other DNA
tgtaatttcttatgcctgtctt

SEQ ID NO: 44777 - DNA, 22 bp, synthetic construct
  misc_feature 1..22: note = chemically synthesized
  source 1..22: mol_type = other DNA
gtaatttcttatgcctgtcttt

SEQ ID NO: 44778 - DNA, 22 bp, synthetic construct
  misc_feature 1..22: note = chemically synthesized
  source 1..22: mol_type = other DNA
taatttcttatgcctgtcttta

SEQ ID NO: 44779 - DNA, 22 bp, synthetic construct
  misc_feature 1..22: note = chemically synthesized
  source 1..22: mol_type = other DNA
cttatgcctgtctttactgcaa

SEQ ID NO: 44780 - DNA, 22 bp, synthetic construct
  misc_feature 1..22: note = chemically synthesized
  source 1..22: mol_type = other DNA
ttatgcctgtctttactgcaat

SEQ ID NO: 44781 - DNA, 22 bp, synthetic construct
  misc_feature 1..22: note = chemically synthesized
  source 1..22: mol_type = other DNA
atgcctgtctttactgcaatct

SEQ ID NO: 44782 - DNA, 22 bp, synthetic construct
  misc_feature 1..22: note = chemically synthesized
  source 1..22: mol_type = other DNA
tgcctgtctttactgcaatctc

SEQ ID NO: 44783 - DNA, 22 bp, synthetic construct
  misc_feature 1..22: note = chemically synthesized
  source 1..22: mol_type = other DNA
tctttactgcaatctctaaaca

SEQ ID NO: 44784 - DNA, 22 bp, synthetic construct
  misc_feature 1..22: note = chemically synthesized
  source 1..22: mol_type = other DNA
tactgcaatctctaaacataaa

SEQ ID NO: 44785 - DNA, 22 bp, synthetic construct
  misc_feature 1..22: note = chemically synthesized
  source 1..22: mol_type = other DNA
actgcaatctctaaacataaat

SEQ ID NO: 44786 - DNA, 22 bp, synthetic construct
  misc_feature 1..22: note = chemically synthesized
  source 1..22: mol_type = other DNA
ctgcaatctctaaacataaatt

SEQ ID NO: 44787 - DNA, 22 bp, synthetic construct
  misc_feature 1..22: note = chemically synthesized
  source 1..22: mol_type = other DNA
caatctctaaacataaattgta

SEQ ID NO: 44788 - DNA, 22 bp, synthetic construct
  misc_feature 1..22: note = chemically synthesized
  source 1..22: mol_type = other DNA
taaacataaattgtaaagattt

SEQ ID NO: 44789 - DNA, 22 bp, synthetic construct
  misc_feature 1..22: note = chemically synthesized
  source 1..22: mol_type = other DNA
aacataaattgtaaagatttca

SEQ ID NO: 44790 - DNA, 22 bp, synthetic construct
  misc_feature 1..22: note = chemically synthesized
  source 1..22: mol_type = other DNA
taaagatttcatggacacttat

SEQ ID NO: 44791 - DNA, 22 bp, synthetic construct
  misc_feature 1..22: note = chemically synthesized
  source 1..22: mol_type = other DNA
catggacacttatcacttcccc

SEQ ID NO: 44792 - DNA, 22 bp, synthetic construct
  misc_feature 1..22: note = chemically synthesized
  source 1..22: mol_type = other DNA
atggacacttatcacttcccca

SEQ ID NO: 44793 - DNA, 22 bp, synthetic construct
  misc_feature 1..22: note = chemically synthesized
  source 1..22: mol_type = other DNA
atcacttccccagtcaatatcc

SEQ ID NO: 44794 - DNA, 22 bp, synthetic construct
  misc_feature 1..22: note = chemically synthesized
  source 1..22: mol_type = other DNA
tcacttccccagtcaatatcct

SEQ ID NO: 44795 - DNA, 22 bp, synthetic construct
  misc_feature 1..22: note = chemically synthesized
  source 1..22: mol_type = other DNA
ccccagtcaatatccttgtgat

SEQ ID NO: 44796 - DNA, 22 bp, synthetic construct
  misc_feature 1..22: note = chemically synthesized
  source 1..22: mol_type = other DNA
cccagtcaatatccttgtgatt

SEQ ID NO: 44797 - DNA, 22 bp, synthetic construct
  misc_feature 1..22: note = chemically synthesized
  source 1..22: mol_type = other DNA
gtgatttatgcctgtctttact

SEQ ID NO: 44798 - DNA, 22 bp, synthetic construct
  misc_feature 1..22: note = chemically synthesized
  source 1..22: mol_type = other DNA
tgatttatgcctgtctttactt

SEQ ID NO: 44799 - DNA, 22 bp, synthetic construct
  misc_feature 1..22: note = chemically synthesized
  source 1..22: mol_type = other DNA
atgcctgtctttactttaatct

SEQ ID NO: 44800 - DNA, 22 bp, synthetic construct
  misc_feature 1..22: note = chemically synthesized
  source 1..22: mol_type = other DNA
tgcctgtctttactttaatctc

SEQ ID NO: 44801 - DNA, 22 bp, synthetic construct
  misc_feature 1..22: note = chemically synthesized
  source 1..22: mol_type = other DNA
tctttactttaatctcttaatc

SEQ ID NO: 44802 - DNA, 22 bp, synthetic construct
  misc_feature 1..22: note = chemically synthesized
  source 1..22: mol_type = other DNA
tactttaatctcttaatcctgt

SEQ ID NO: 44803 - DNA, 22 bp, synthetic construct
  misc_feature 1..22: note = chemically synthesized
  source 1..22: mol_type = other DNA
actttaatctcttaatcctgtc

SEQ ID NO: 44804 - DNA, 22 bp, synthetic construct
  misc_feature 1..22: note = chemically synthesized
  source 1..22: mol_type = other DNA
ctttaatctcttaatcctgtca

SEQ ID NO: 44805 - DNA, 22 bp, synthetic construct
  misc_feature 1..22: note = chemically synthesized
  source 1..22: mol_type = other DNA
taatctcttaatcctgtcagct

SEQ ID NO: 44806 - DNA, 22 bp, synthetic construct
  misc_feature 1..22: note = chemically synthesized
  source 1..22: mol_type = other DNA
aatctcttaatcctgtcagctg

SEQ ID NO: 44807 - DNA, 22 bp, synthetic construct
  misc_feature 1..22: note = chemically synthesized
  source 1..22: mol_type = other DNA
atctcttaatcctgtcagctga

SEQ ID NO: 44808 - DNA, 22 bp, synthetic construct
  misc_feature 1..22: note = chemically synthesized
  source 1..22: mol_type = other DNA
ttaatcctgtcagctgaggagg

SEQ ID NO: 44809 - DNA, 22 bp, synthetic construct
  misc_feature 1..22: note = chemically synthesized
  source 1..22: mol_type = other DNA
aatcctgtcagctgaggaggat

SEQ ID NO: 44810 - DNA, 22 bp, synthetic construct
  misc_feature 1..22: note = chemically synthesized
  source 1..22: mol_type = other DNA
atcctgtcagctgaggaggatg

SEQ ID NO: 44811 - DNA, 22 bp, synthetic construct
  misc_feature 1..22: note = chemically synthesized
  source 1..22: mol_type = other DNA
tcagctgaggaggatgtatatt

SEQ ID NO: 44812 - DNA, 22 bp, synthetic construct
  misc_feature 1..22: note = chemically synthesized
  source 1..22: mol_type = other DNA
aggaggatgtatattgcctcag

SEQ ID NO: 44813 - DNA, 22 bp, synthetic construct
  misc_feature 1..22: note = chemically synthesized
  source 1..22: mol_type = other DNA
cctcaggaccctgtaataattg

SEQ ID NO: 44814 - DNA, 22 bp, synthetic construct
  misc_feature 1..22: note = chemically synthesized
  source 1..22: mol_type = other DNA
aggaccctgtaataattgcatt

SEQ ID NO: 44815 - DNA, 22 bp, synthetic construct
  misc_feature 1..22: note = chemically synthesized
  source 1..22: mol_type = other DNA
taataattgcattaactgcaca

SEQ ID NO: 44816 - DNA, 22 bp, synthetic construct
  misc_feature 1..22: note = chemically synthesized
  source 1..22: mol_type = other DNA
cattaactgcacaaattgtaca

SEQ ID NO: 44817 - DNA, 22 bp, synthetic construct
  misc_feature 1..22: note = chemically synthesized
  source 1..22: mol_type = other DNA
actgcacaaattgtacagcatg

SEQ ID NO: 44818 - DNA, 22 bp, synthetic construct
  misc_feature 1..22: note = chemically synthesized
  source 1..22: mol_type = other DNA
cacaaattgtacagcatgtgtg

SEQ ID NO: 44819 - DNA, 22 bp, synthetic construct
  misc_feature 1..22: note = chemically synthesized
  source 1..22: mol_type = other DNA
tacagcatgtgtgtttgagcaa

SEQ ID NO: 44820 - DNA, 22 bp, synthetic construct
  misc_feature 1..22: note = chemically synthesized
  source 1..22: mol_type = other DNA
gagcaacatgaaatgtggacac

SEQ ID NO: 44821 - DNA, 22 bp, synthetic construct
  misc_feature 1..22: note = chemically synthesized
  source 1..22: mol_type = other DNA
agcaacatgaaatgtggacacc

SEQ ID NO: 44822 - DNA, 22 bp, synthetic construct
  misc_feature 1..22: note = chemically synthesized
  source 1..22: mol_type = other DNA
gaaaaaagaacaggataacagc

SEQ ID NO: 44823 - DNA, 22 bp, synthetic construct
  misc_feature 1..22: note = chemically synthesized
  source 1..22: mol_type = other DNA
aaaaaagaacaggataacagca

SEQ ID NO: 44824 - DNA, 22 bp, synthetic construct
  misc_feature 1..22: note = chemically synthesized
  source 1..22: mol_type = other DNA
ttcagggaataagagagataac

SEQ ID NO: 44825 - DNA, 22 bp, synthetic construct
  misc_feature 1..22: note = chemically synthesized
  source 1..22: mol_type = other DNA
agggaataagagagataacctt

SEQ ID NO: 44826 - DNA, 22 bp, synthetic construct
  misc_feature 1..22: note = chemically synthesized
  source 1..22: mol_type = other DNA
aaactctgactgctggtgagcc

SEQ ID NO: 44827 - DNA, 22 bp, synthetic construct
  misc_feature 1..22: note = chemically synthesized
  source 1..22: mol_type = other DNA
aactctgactgctggtgagcca

SEQ ID NO: 44828 - DNA, 22 bp, synthetic construct
  misc_feature 1..22: note = chemically synthesized
  source 1..22: mol_type = other DNA
tgactgctggtgagccaggcag

SEQ ID NO: 44829 - DNA, 22 bp, synthetic construct
  misc_feature 1..22: note = chemically synthesized
  source 1..22: mol_type = other DNA
actgctggtgagccaggcagaa

SEQ ID NO: 44830 - DNA, 22 bp, synthetic construct
  misc_feature 1..22: note = chemically synthesized
  source 1..22: mol_type = other DNA
ctggtgagccaggcagaacaga

SEQ ID NO: 44831 - DNA, 22 bp, synthetic construct
  misc_feature 1..22: note = chemically synthesized
  source 1..22: mol_type = other DNA
gtgagccaggcagaacagagcc

SEQ ID NO: 44832 - DNA, 22 bp, synthetic construct
  misc_feature 1..22: note = chemically synthesized
  source 1..22: mol_type = other DNA
ctcttctttcaaaagcaaatgg

SEQ ID NO: 44833 - DNA, 22 bp, synthetic construct
  misc_feature 1..22: note = chemically synthesized
  source 1..22: mol_type = other DNA
tcttctttcaaaagcaaatggg

SEQ ID NO: 44834 - DNA, 22 bp, synthetic construct
  misc_feature 1..22: note = chemically synthesized
  source 1..22: mol_type = other DNA
ttctttcaaaagcaaatgggag

SEQ ID NO: 44835 - DNA, 22 bp, synthetic construct
  misc_feature 1..22: note = chemically synthesized
  source 1..22: mol_type = other DNA
ctttcaaaagcaaatgggagaa

SEQ ID NO: 44836 - DNA, 22 bp, synthetic construct
  misc_feature 1..22: note = chemically synthesized
  source 1..22: mol_type = other DNA
tttcaaaagcaaatgggagaaa

SEQ ID NO: 44837 - DNA, 22 bp, synthetic construct
  misc_feature 1..22: note = chemically synthesized
  source 1..22: mol_type = other DNA
tcaaaagcaaatgggagaaata

SEQ ID NO: 44838 - DNA, 22 bp, synthetic construct
  misc_feature 1..22: note = chemically synthesized
  source 1..22: mol_type = other DNA
caaaagcaaatgggagaaatat

SEQ ID NO: 44839 - DNA, 22 bp, synthetic construct
  misc_feature 1..22: note = chemically synthesized
  source 1..22: mol_type = other DNA
aaaagcaaatgggagaaatatc

SEQ ID NO: 44840 - DNA, 22 bp, synthetic construct
  misc_feature 1..22: note = chemically synthesized
  source 1..22: mol_type = other DNA
aattctttttctcagcatggaa

SEQ ID NO: 44841 - DNA, 22 bp, synthetic construct
  misc_feature 1..22: note = chemically synthesized
  source 1..22: mol_type = other DNA
tttttctcagcatggaacatcc

SEQ ID NO: 44842 - DNA, 22 bp, synthetic construct
  misc_feature 1..22: note = chemically synthesized
  source 1..22: mol_type = other DNA
tttctcagcatggaacatccct

SEQ ID NO: 44843 - DNA, 22 bp, synthetic construct
  misc_feature 1..22: note = chemically synthesized
  source 1..22: mol_type = other DNA
ttctcagcatggaacatccctg

SEQ ID NO: 44844 - DNA, 22 bp, synthetic construct
  misc_feature 1..22: note = chemically synthesized
  source 1..22: mol_type = other DNA
tctcagcatggaacatccctga

SEQ ID NO: 44845 - DNA, 22 bp, synthetic construct
  misc_feature 1..22: note = chemically synthesized
  source 1..22: mol_type = other DNA
ctcagcatggaacatccctgag

SEQ ID NO: 44846 - DNA, 22 bp, synthetic construct
  misc_feature 1..22: note = chemically synthesized
  source 1..22: mol_type = other DNA
tcagcatggaacatccctgaga

SEQ ID NO: 44847 - DNA, 22 bp, synthetic construct
  misc_feature 1..22: note = chemically synthesized
  source 1..22: mol_type = other DNA
agcatggaacatccctgagaaa

SEQ ID NO: 44848 - DNA, 22 bp, synthetic construct
  misc_feature 1..22: note = chemically synthesized
  source 1..22: mol_type = other DNA
agaaagagaatacgagccagga

SEQ ID NO: 44849 - DNA, 22 bp, synthetic construct
  misc_feature 1..22: note = chemically synthesized
  source 1..22: mol_type = other DNA
ataaacagcccccctccaggtg

SEQ ID NO: 44850 - DNA, 22 bp, synthetic construct
  misc_feature 1..22: note = chemically synthesized
  source 1..22: mol_type = other DNA
taaacagcccccctccaggtgc

SEQ ID NO: 44851 - DNA, 22 bp, synthetic construct
  misc_feature 1..22: note = chemically synthesized
  source 1..22: mol_type = other DNA
caggtgcgcctgtctcttatgg

SEQ ID NO: 44852 - DNA, 22 bp, synthetic construct
  misc_feature 1..22: note = chemically synthesized
  source 1..22: mol_type = other DNA
tctcttatggtcgagactgcag

SEQ ID NO: 44853 - DNA, 22 bp, synthetic construct
  misc_feature 1..22: note = chemically synthesized
  source 1..22: mol_type = other DNA
ttatggtcgagactgcaggggt

SEQ ID NO: 44854 - DNA, 22 bp, synthetic construct
  misc_feature 1..22: note = chemically synthesized
  source 1..22: mol_type = other DNA
atggtcgagactgcaggggtga

SEQ ID NO: 44855 - DNA, 22 bp, synthetic construct
  misc_feature 1..22: note = chemically synthesized
  source 1..22: mol_type = other DNA
tggtcgagactgcaggggtgaa

SEQ ID NO: 44856 - DNA, 22 bp, synthetic construct
  misc_feature 1..22: note = chemically synthesized
  source 1..22: mol_type = other DNA
caggggtgaaatagaccccagt

SEQ ID NO: 44857 - DNA, 22 bp, synthetic construct
  misc_feature 1..22: note = chemically synthesized
  source 1..22: mol_type = other DNA
ccacagcgctcccaggcttatt

SEQ ID NO: 44858 - DNA, 22 bp, synthetic construct
  misc_feature 1..22: note = chemically synthesized
  source 1..22: mol_type = other DNA
ccaggcttattaggaagaggaa

SEQ ID NO: 44859 - DNA, 22 bp, synthetic construct
  misc_feature 1..22: note = chemically synthesized
  source 1..22: mol_type = other DNA
attaggaagaggaaattcccgc

SEQ ID NO: 44860 - DNA, 22 bp, synthetic construct
  misc_feature 1..22: note = chemically synthesized
  source 1..22: mol_type = other DNA
ttaggaagaggaaattcccgcc

SEQ ID NO: 44861 - DNA, 22 bp, synthetic construct
  misc_feature 1..22: note = chemically synthesized
  source 1..22: mol_type = other DNA
ggaagaggaaattcccgcctaa

SEQ ID NO: 44862 - DNA, 22 bp, synthetic construct
  misc_feature 1..22: note = chemically synthesized
  source 1..22: mol_type = other DNA
ccgcctaataaattttggtcag

SEQ ID NO: 44863 - DNA, 22 bp, synthetic construct
  misc_feature 1..22: note = chemically synthesized
  source 1..22: mol_type = other DNA
ataaattttggtcagaccagtt

SEQ ID NO: 44864 - DNA, 22 bp, synthetic construct
  misc_feature 1..22: note = chemically synthesized
  source 1..22: mol_type = other DNA
tggtcagaccagttgatcctaa

SEQ ID NO: 44865 - DNA, 22 bp, synthetic construct
  misc_feature 1..22: note = chemically synthesized
  source 1..22: mol_type = other DNA
ggtcagaccagttgatcctaaa

SEQ ID NO: 44866 - DNA, 22 bp, synthetic construct
  misc_feature 1..22: note = chemically synthesized
  source 1..22: mol_type = other DNA
gtcagaccagttgatcctaaaa

SEQ ID NO: 44867 - DNA, 22 bp, synthetic construct
  misc_feature 1..22: note = chemically synthesized
  source 1..22: mol_type = other DNA
atcctaaaaaccctgtctcctg

SEQ ID NO: 44868 - DNA, 22 bp, synthetic construct
  misc_feature 1..22: note = chemically synthesized
  source 1..22: mol_type = other DNA
aaaaccctgtctcctgataaga

SEQ ID NO: 44869 - DNA, 22 bp, synthetic construct
  misc_feature 1..22: note = chemically synthesized
  source 1..22: mol_type = other DNA
tctcctgataagatgttatcaa

SEQ ID NO: 44870 - DNA, 22 bp, synthetic construct
  misc_feature 1..22: note = chemically synthesized
  source 1..22: mol_type = other DNA
ctgataagatgttatcaatgac

SEQ ID NO: 44871 - DNA, 22 bp, synthetic construct
  misc_feature 1..22: note = chemically synthesized
  source 1..22: mol_type = other DNA
ataagatgttatcaatgacaat

SEQ ID NO: 44872 - DNA, 22 bp, synthetic construct
  misc_feature 1..22: note = chemically synthesized
  source 1..22: mol_type = other DNA
tcaatgacaatggtgcccgaaa

SEQ ID NO: 44873 - DNA, 22 bp, synthetic construct
  misc_feature 1..22: note = chemically synthesized
  source 1..22: mol_type = other DNA
cattagcaattttaatttcgcc

SEQ ID NO: 44874 - DNA, 22 bp, synthetic construct
  misc_feature 1..22: note = chemically synthesized
  source 1..22: mol_type = other DNA
attagcaattttaatttcgcct

SEQ ID NO: 44875 - DNA, 22 bp, synthetic construct
  misc_feature 1..22: note = chemically synthesized
  source 1..22: mol_type = other DNA
gcaattttaatttcgcctcggt

SEQ ID NO: 44876 - DNA, 22 bp, synthetic construct
  misc_feature 1..22: note = chemically synthesized
  source 1..22: mol_type = other DNA
taatttcgcctcggtcctgtgg

SEQ ID NO: 44877 - DNA, 22 bp, synthetic construct
  misc_feature 1..22: note = chemically synthesized
  source 1..22: mol_type = other DNA
aatttcgcctcggtcctgtggt

SEQ ID NO: 44878 - DNA, 22 bp, synthetic construct
  misc_feature 1..22: note = chemically synthesized
  source 1..22: mol_type = other DNA
atttcgcctcggtcctgtggtc

SEQ ID NO: 44879 - DNA, 22 bp, synthetic construct
  misc_feature 1..22: note = chemically synthesized
  source 1..22: mol_type = other DNA
cgcctcggtcctgtggtcctgt

SEQ ID NO: 44880 - DNA, 22 bp, synthetic construct
  misc_feature 1..22: note = chemically synthesized
  source 1..22: mol_type = other DNA
gcctcggtcctgtggtcctgtg

SEQ ID NO: 44881 - DNA, 22 bp, synthetic construct
  misc_feature 1..22: note = chemically synthesized
  source 1..22: mol_type = other DNA
ggtcctgtggtcctgtgatctc

SEQ ID NO: 44882 - DNA, 22 bp, synthetic construct
  misc_feature 1..22: note = chemically synthesized
  source 1..22: mol_type = other DNA
tggtcctgtgatctcaccctgc

SEQ ID NO: 44883 - DNA, 22 bp, synthetic construct
  misc_feature 1..22: note = chemically synthesized
  source 1..22: mol_type = other DNA
tgatctcaccctgcctccactt

SEQ ID NO: 44884 - DNA, 22 bp, synthetic construct
  misc_feature 1..22: note = chemically synthesized
  source 1..22: mol_type = other DNA
accctgcctccacttgccttgt

SEQ ID NO: 44885 - DNA, 22 bp, synthetic construct
  misc_feature 1..22: note = chemically synthesized
  source 1..22: mol_type = other DNA
cctccacttgccttgtgatatt

SEQ ID NO: 44886 - DNA, 22 bp, synthetic construct
  misc_feature 1..22: note = chemically synthesized
  source 1..22: mol_type = other DNA
cacttgccttgtgatattctat

SEQ ID NO: 44887 - DNA, 22 bp, synthetic construct
  misc_feature 1..22: note = chemically synthesized
  source 1..22: mol_type = other DNA
gccttgtgatattctattacct

SEQ ID NO: 44888 - DNA, 22 bp, synthetic construct
  misc_feature 1..22: note = chemically synthesized
  source 1..22: mol_type = other DNA
ccttgtgatattctattacctt

SEQ ID NO: 44889 - DNA, 22 bp, synthetic construct
  misc_feature 1..22: note = chemically synthesized
  source 1..22: mol_type = other DNA
gtgatattctattaccttgtaa

SEQ ID NO: 44890 - DNA, 22 bp, synthetic construct
  misc_feature 1..22: note = chemically synthesized
  source 1..22: mol_type = other DNA
tgatattctattaccttgtaaa

SEQ ID NO: 44891 - DNA, 22 bp, synthetic construct
  misc_feature 1..22: note = chemically synthesized
  source 1..22: mol_type = other DNA
tattaccttgtaaagtacttga

SEQ ID NO: 44892 - DNA, 22 bp, synthetic construct
  misc_feature 1..22: note = chemically synthesized
  source 1..22: mol_type = other DNA
ttaccttgtaaagtacttgatg

SEQ ID NO: 44893 - DNA, 22 bp, synthetic construct
  misc_feature 1..22: note = chemically synthesized
  source 1..22: mol_type = other DNA
ccttgtaaagtacttgatgtct

SEQ ID NO: 44894 - DNA, 22 bp, synthetic construct
  misc_feature 1..22: note = chemically synthesized
  source 1..22: mol_type = other DNA
gtaaagtacttgatgtctgtga

SEQ ID NO: 44895 - DNA, 22 bp, synthetic construct
  misc_feature 1..22: note = chemically synthesized
  source 1..22: mol_type = other DNA
taaagtacttgatgtctgtgac

SEQ ID NO: 44896 - DNA, 22 bp, synthetic construct
  misc_feature 1..22: note = chemically synthesized
  source 1..22: mol_type = other DNA
gatgtctgtgacccacacctat

SEQ ID NO: 44897 - DNA, 22 bp, synthetic construct
  misc_feature 1..22: note = chemically synthesized
  source 1..22: mol_type = other DNA
atgtctgtgacccacacctatt

SEQ ID NO: 44898 - DNA, 22 bp, synthetic construct
  misc_feature 1..22: note = chemically synthesized
  source 1..22: mol_type = other DNA
tgacccacacctatttgcacac

SEQ ID NO: 44899 - DNA, 22 bp, synthetic construct
  misc_feature 1..22: note = chemically synthesized
  source 1..22: mol_type = other DNA
tttgcacactgcctccccattt

SEQ ID NO: 44900 - DNA, 22 bp, synthetic construct
  misc_feature 1..22: note = chemically synthesized
  source 1..22: mol_type = other DNA
gcacactgcctccccatttgaa

SEQ ID NO: 44901 - DNA, 22 bp, synthetic construct
  misc_feature 1..22: note = chemically synthesized
  source 1..22: mol_type = other DNA
cacactgcctccccatttgaaa

SEQ ID NO: 44902 - DNA, 22 bp, synthetic construct
  misc_feature 1..22: note = chemically synthesized
  source 1..22: mol_type = other DNA
cctccccatttgaaaatcccta

SEQ ID NO: 44903 - DNA, 22 bp, synthetic construct
  misc_feature 1..22: note = chemically synthesized
  source 1..22: mol_type = other DNA
cccatttgaaaatccctaatac

SEQ ID NO: 44904 - DNA, 22 bp, synthetic construct
  misc_feature 1..22: note = chemically synthesized
  source 1..22: mol_type = other DNA
gaaaatccctaatacaaacttg

SEQ ID NO: 44905 - DNA, 22 bp, synthetic construct
  misc_feature 1..22: note = chemically synthesized
  source 1..22: mol_type = other DNA
aaaatccctaatacaaacttgc

SEQ ID NO: 44906 - DNA, 22 bp, synthetic construct
  misc_feature 1..22: note = chemically synthesized
  source 1..22: mol_type = other DNA
atacaaacttgctggtttttgt

SEQ ID NO: 44907 - DNA, 22 bp, synthetic construct
  misc_feature 1..22: note = chemically synthesized
  source 1..22: mol_type = other DNA
gctggtttttgtggcttgtggg

SEQ ID NO: 44908 - DNA, 22 bp, synthetic construct
  misc_feature 1..22: note = chemically synthesized
  source 1..22: mol_type = other DNA
ctggtttttgtggcttgtgggg

SEQ ID NO: 44909 - DNA, 22 bp, synthetic construct
  misc_feature 1..22: note = chemically synthesized
  source 1..22: mol_type = other DNA
gtttttgtggcttgtggggcat

SEQ ID NO: 44910 - DNA, 22 bp, synthetic construct
  misc_feature 1..22: note = chemically synthesized
  source 1..22: mol_type = other DNA
ttgtggcttgtggggcatcacg

SEQ ID NO: 44911 - DNA, 22 bp, synthetic construct
  misc_feature 1..22: note = chemically synthesized
  source 1..22: mol_type = other DNA
tgtggcttgtggggcatcacgg

SEQ ID NO: 44912 - DNA, 22 bp, synthetic construct
  misc_feature 1..22: note = chemically synthesized
  source 1..22: mol_type = other DNA
gtggcttgtggggcatcacgga

SEQ ID NO: 44913 - DNA, 22 bp, synthetic construct
  misc_feature 1..22: note = chemically synthesized
  source 1..22: mol_type = other DNA
tggcttgtggggcatcacggaa

SEQ ID NO: 44914 - DNA, 22 bp, synthetic construct
  misc_feature 1..22: note = chemically synthesized
  source 1..22: mol_type = other DNA
gtggggcatcacggaacctacc

SEQ ID NO: 44915 - DNA, 22 bp, synthetic construct
  misc_feature 1..22: note = chemically synthesized
  source 1..22: mol_type = other DNA
tggggcatcacggaacctaccg

SEQ ID NO: 44916 - DNA, 22 bp, synthetic construct
  misc_feature 1..22: note = chemically synthesized
  source 1..22: mol_type = other DNA
ccgaaatgtgatgcctcccccg

SEQ ID NO: 44917 - DNA, 22 bp, synthetic construct
  misc_feature 1..22: note = chemically synthesized
  source 1..22: mol_type = other DNA
ccccggatgcccggctttaaaa

SEQ ID NO: 44918 - DNA, 22 bp, synthetic construct
  misc_feature 1..22: note = chemically synthesized
  source 1..22: mol_type = other DNA
taaaatttctctcttttgtact

SEQ ID NO: 44919 - DNA, 22 bp, synthetic construct
  misc_feature 1..22: note = chemically synthesized
  source 1..22: mol_type = other DNA
aaaatttctctcttttgtactc

SEQ ID NO: 44920 - DNA, 22 bp, synthetic construct
  misc_feature 1..22: note = chemically synthesized
  source 1..22: mol_type = other DNA
aaatttctctcttttgtactct

SEQ ID NO: 44921 - DNA, 22 bp, synthetic construct
  misc_feature 1..22: note = chemically synthesized
  source 1..22: mol_type = other DNA
ctctcttttgtactctgtccct

SEQ ID NO: 44922 - DNA, 22 bp, synthetic construct
  misc_feature 1..22: note = chemically synthesized
  source 1..22: mol_type = other DNA
tctcttttgtactctgtccctt

SEQ ID NO: 44923 - DNA, 22 bp, synthetic construct
  misc_feature 1..22: note = chemically synthesized
  source 1..22: mol_type = other DNA
tcttttgtactctgtcccttta

SEQ ID NO: 44924 - DNA, 22 bp, synthetic construct
  misc_feature 1..22: note = chemically synthesized
  source 1..22: mol_type = other DNA
ttttgtactctgtccctttatt

SEQ ID NO: 44925 - DNA, 22 bp, synthetic construct
  misc_feature 1..22: note = chemically synthesized
  source 1..22: mol_type = other DNA
ttgtactctgtccctttatttc

SEQ ID NO: 44926 - DNA, 22 bp, synthetic construct
  misc_feature 1..22: note = chemically synthesized
  source 1..22: mol_type = other DNA
tgtactctgtccctttatttct

SEQ ID NO: 44927 - DNA, 22 bp, synthetic construct
  misc_feature 1..22: note = chemically synthesized
  source 1..22: mol_type = other DNA
gtactctgtccctttatttcta

SEQ ID NO: 44928 - DNA, 22 bp, synthetic construct
  misc_feature 1..22: note = chemically synthesized
  source 1..22: mol_type = other DNA
tactctgtccctttatttctaa

SEQ ID NO: 44929 - DNA, 22 bp, synthetic construct
  misc_feature 1..22: note = chemically synthesized
  source 1..22: mol_type = other DNA
tgtccctttatttctaaagttg

SEQ ID NO: 44930 - DNA, 22 bp, synthetic construct
  misc_feature 1..22: note = chemically synthesized
  source 1..22: mol_type = other DNA
tccctttatttctaaagttggc

SEQ ID NO: 44931 - DNA, 22 bp, synthetic construct
  misc_feature 1..22: note = chemically synthesized
  source 1..22: mol_type = other DNA
tatttctaaagttggccgacgc

SEQ ID NO: 44932 - DNA, 22 bp, synthetic construct
  misc_feature 1..22: note = chemically synthesized
  source 1..22: mol_type = other DNA
atttctaaagttggccgacgct

SEQ ID NO: 44933 - DNA, 22 bp, synthetic construct
  misc_feature 1..22: note = chemically synthesized
  source 1..22: mol_type = other DNA
tttctaaagttggccgacgctt

SEQ ID NO: 44934 - DNA, 22 bp, synthetic construct
  misc_feature 1..22: note = chemically synthesized
  source 1..22: mol_type = other DNA
ctaaagttggccgacgcttagg

SEQ ID NO: 44935 - DNA, 22 bp, synthetic construct
  misc_feature 1..22: note = chemically synthesized
  source 1..22: mol_type = other DNA
taaagttggccgacgcttaggg

SEQ ID NO: 44936 - DNA, 22 bp, synthetic construct
  misc_feature 1..22: note = chemically synthesized
  source 1..22: mol_type = other DNA
aagttggccgacgcttagggaa

SEQ ID NO: 44937 - DNA, 22 bp, synthetic construct
  misc_feature 1..22: note = chemically synthesized
  source 1..22: mol_type = other DNA
gccgacgcttagggaaaataga

SEQ ID NO: 44938 - DNA, 22 bp, synthetic construct
  misc_feature 1..22: note = chemically synthesized
  source 1..22: mol_type = other DNA
agggaaaatagaaaagaaccta

SEQ ID NO: 44939 - DNA, 22 bp, synthetic construct
  misc_feature 1..22: note = chemically synthesized
  source 1..22: mol_type = other DNA
gggaaaatagaaaagaacctac

SEQ ID NO: 44940 - DNA, 22 bp, synthetic construct
  misc_feature 1..22: note = chemically synthesized
  source 1..22: mol_type = other DNA
cgtgaatattggggcaggttcc

SEQ ID NO: 44941 - DNA, 22 bp, synthetic construct
  misc_feature 1..22: note = chemically synthesized
  source 1..22: mol_type = other DNA
gggcaggttccctgatactcag

SEQ ID NO: 44942 - DNA, 22 bp, synthetic construct
  misc_feature 1..22: note = chemically synthesized
  source 1..22: mol_type = other DNA
cctgatactcagtggcgtggag

SEQ ID NO: 44943 - DNA, 22 bp, synthetic construct
  misc_feature 1..22: note = chemically synthesized
  source 1..22: mol_type = other DNA
atactcagtggcgtggagatgt

SEQ ID NO: 44944 - DNA, 22 bp, synthetic construct
  misc_feature 1..22: note = chemically synthesized
  source 1..22: mol_type = other DNA
agtggcgtggagatgtaacaag

SEQ ID NO: 44945 - DNA, 22 bp, synthetic construct
  misc_feature 1..22: note = chemically synthesized
  source 1..22: mol_type = other DNA
gatgtgtgagtgatgatcaggc

SEQ ID NO: 44946 - DNA, 22 bp, synthetic construct
  misc_feature 1..22: note = chemically synthesized
  source 1..22: mol_type = other DNA
tatttggaagaaatatcagatg

SEQ ID NO: 44947 - DNA, 22 bp, synthetic construct
  misc_feature 1..22: note = chemically synthesized
  source 1..22: mol_type = other DNA
ggaagaaatatcagatgtgaat

SEQ ID NO: 44948 - DNA, 22 bp, synthetic construct
  misc_feature 1..22: note = chemically synthesized
  source 1..22: mol_type = other DNA
gaagaaatatcagatgtgaatg

SEQ ID NO: 44949 - DNA, 22 bp, synthetic construct
  misc_feature 1..22: note = chemically synthesized
  source 1..22: mol_type = other DNA
tgacctaggaagcaatggaagt

SEQ ID NO: 44950 - DNA, 22 bp, synthetic construct
  misc_feature 1..22: note = chemically synthesized
  source 1..22: mol_type = other DNA
ggaagcaatggaagtgaaaaat

SEQ ID NO: 44951 - DNA, 22 bp, synthetic construct
  misc_feature 1..22: note = chemically synthesized
  source 1..22: mol_type = other DNA
ttctttttgccttcagactcaa

SEQ ID NO: 44952 - DNA, 22 bp, synthetic construct
  misc_feature 1..22: note = chemically synthesized
  source 1..22: mol_type = other DNA
tttttgccttcagactcaatat

SEQ ID NO: 44953 - DNA, 22 bp, synthetic construct
  misc_feature 1..22: note = chemically synthesized
  source 1..22: mol_type = other DNA
tttgccttcagactcaatattt

SEQ ID NO: 44954 - DNA, 22 bp, synthetic construct
  misc_feature 1..22: note = chemically synthesized
  source 1..22: mol_type = other DNA
ttgccttcagactcaatatttt

SEQ ID NO: 44955 - DNA, 22 bp, synthetic construct
  misc_feature 1..22: note = chemically synthesized
  source 1..22: mol_type = other DNA
tgccttcagactcaatattttg

SEQ ID NO: 44956 - DNA, 22 bp, synthetic construct
  misc_feature 1..22: note = chemically synthesized
  source 1..22: mol_type = other DNA
gccttcagactcaatattttgt

SEQ ID NO: 44957 - DNA, 22 bp, synthetic construct
  misc_feature 1..22: note = chemically synthesized
  source 1..22: mol_type = other DNA
ccttcagactcaatattttgta

SEQ ID NO: 44958 - DNA, 22 bp, synthetic construct
  misc_feature 1..22: note = chemically synthesized
  source 1..22: mol_type = other DNA
cagactcaatattttgtatatt

SEQ ID NO: 44959 - DNA, 22 bp, synthetic construct
  misc_feature 1..22: note = chemically synthesized
  source 1..22: mol_type = other DNA
agactcaatattttgtatattt

SEQ ID NO: 44960 - DNA, 22 bp, synthetic construct
  misc_feature 1..22: note = chemically synthesized
  source 1..22: mol_type = other DNA
aatattttgtatatttgaaaat

SEQ ID NO: 44961 - DNA, 22 bp, synthetic construct
  misc_feature 1..22: note = chemically synthesized
  source 1..22: mol_type = other DNA
tgtatatttgaaaatttgtcaa

SEQ ID NO: 44962 - DNA, 22 bp, synthetic construct
  misc_feature 1..22: note = chemically synthesized
  source 1..22: mol_type = other DNA
gtatatttgaaaatttgtcaac

SEQ ID NO: 44963 - DNA, 22 bp, synthetic construct
  misc_feature 1..22: note = chemically synthesized
  source 1..22: mol_type = other DNA
tatatttgaaaatttgtcaaca

SEQ ID NO: 44964 - DNA, 22 bp, synthetic construct
  misc_feature 1..22: note = chemically synthesized
  source 1..22: mol_type = other DNA
gaaaatttgtcaacacaaaaaa

SEQ ID NO: 44965 - DNA, 22 bp, synthetic construct
  misc_feature 1..22: note = chemically synthesized
  source 1..22: mol_type = other DNA
aaaatttgtcaacacaaaaaat

SEQ ID NO: 44966 - DNA, 22 bp, synthetic construct
  misc_feature 1..22: note = chemically synthesized
  source 1..22: mol_type = other DNA
gtcaacacaaaaaatactaagt

SEQ ID NO: 44967 - DNA, 22 bp, synthetic construct
  misc_feature 1..22: note = chemically synthesized
  source 1..22: mol_type = other DNA
tcaacacaaaaaatactaagtt

SEQ ID NO: 44968 - DNA, 22 bp, synthetic construct
  misc_feature 1..22: note = chemically synthesized
  source 1..22: mol_type = other DNA
agttgtatactgatttgttaaa

SEQ ID NO: 44969 - DNA, 22 bp, synthetic construct
  misc_feature 1..22: note = chemically synthesized
  source 1..22: mol_type = other DNA
tatactgatttgttaaaagcag

SEQ ID NO: 44970 - DNA, 22 bp, synthetic construct
  misc_feature 1..22: note = chemically synthesized
  source 1..22: mol_type = other DNA
atttgttaaaagcagcagcatg

SEQ ID NO: 44971 - DNA, 22 bp, synthetic construct
  misc_feature 1..22: note = chemically synthesized
  source 1..22: mol_type = other DNA
gttaaaagcagcagcatgcagt

SEQ ID NO: 44972 - DNA, 22 bp, synthetic construct
  misc_feature 1..22: note = chemically synthesized
  source 1..22: mol_type = other DNA
ttaaaagcagcagcatgcagtt

SEQ ID NO: 44973 - DNA, 22 bp, synthetic construct
  misc_feature 1..22: note = chemically synthesized
  source 1..22: mol_type = other DNA
aaagcagcagcatgcagttagg

SEQ ID NO: 44974 - DNA, 22 bp, synthetic construct
  misc_feature 1..22: note = chemically synthesized
  source 1..22: mol_type = other DNA
ggatgatatctttggggaaatg

SEQ ID NO: 44975 - DNA, 22 bp, synthetic construct
  misc_feature 1..22: note = chemically synthesized
  source 1..22: mol_type = other DNA
tggggaaatggcagagaccatc

SEQ ID NO: 44976 - DNA, 22 bp, synthetic construct
  misc_feature 1..22: note = chemically synthesized
  source 1..22: mol_type = other DNA
ggggaaatggcagagaccatcc

SEQ ID NO: 44977 - DNA, 22 bp, synthetic construct
  misc_feature 1..22: note = chemically synthesized
  source 1..22: mol_type = other DNA
gggaaatggcagagaccatcca

SEQ ID NO: 44978 - DNA, 22 bp, synthetic construct
  misc_feature 1..22: note = chemically synthesized
  source 1..22: mol_type = other DNA
tgattctccactgcatccaatt

SEQ ID NO: 44979 - DNA, 22 bp, synthetic construct
  misc_feature 1..22: note = chemically synthesized
  source 1..22: mol_type = other DNA
attctccactgcatccaatttt

SEQ ID NO: 44980 - DNA, 22 bp, synthetic construct
  misc_feature 1..22: note = chemically synthesized
  source 1..22: mol_type = other DNA
tccactgcatccaattttctac

SEQ ID NO: 44981 - DNA, 22 bp, synthetic construct
  misc_feature 1..22: note = chemically synthesized
  source 1..22: mol_type = other DNA
cactgcatccaattttctactc

SEQ ID NO: 44982 - DNA, 22 bp, synthetic construct
  misc_feature 1..22: note = chemically synthesized
  source 1..22: mol_type = other DNA
catccaattttctactctcaaa

SEQ ID NO: 44983 - DNA, 22 bp, synthetic construct
  misc_feature 1..22: note = chemically synthesized
  source 1..22: mol_type = other DNA
tctactctcaaaatgaacccca

SEQ ID NO: 44984 - DNA, 22 bp, synthetic construct
  misc_feature 1..22: note = chemically synthesized
  source 1..22: mol_type = other DNA
ctactctcaaaatgaaccccat

SEQ ID NO: 44985 - DNA, 22 bp, synthetic construct
  misc_feature 1..22: note = chemically synthesized
  source 1..22: mol_type = other DNA
tactctcaaaatgaaccccatg

SEQ ID NO: 44986 - DNA, 22 bp, synthetic construct
  misc_feature 1..22: note = chemically synthesized
  source 1..22: mol_type = other DNA
ctctcaaaatgaaccccatgct

SEQ ID NO: 44987 - DNA, 22 bp, synthetic construct
  misc_feature 1..22: note = chemically synthesized
  source 1..22: mol_type = other DNA
tcaaaatgaaccccatgctcac

SEQ ID NO: 44988 - DNA, 22 bp, synthetic construct
  misc_feature 1..22: note = chemically synthesized
  source 1..22: mol_type = other DNA
aaaatgaaccccatgctcacca

SEQ ID NO: 44989 - DNA, 22 bp, synthetic construct
  misc_feature 1..22: note = chemically synthesized
  source 1..22: mol_type = other DNA
accatcaacgggattgaatttg

SEQ ID NO: 44990 - DNA, 22 bp, synthetic construct
  misc_feature 1..22: note = chemically synthesized
  source 1..22: mol_type = other DNA
aatttgagctgctgagaattgg

SEQ ID NO: 44991 - DNA, 22 bp, synthetic construct
  misc_feature 1..22: note = chemically synthesized
  source 1..22: mol_type = other DNA
gagctgctgagaattggtaata

SEQ ID NO: 44992 - DNA, 22 bp, synthetic construct
  misc_feature 1..22: note = chemically synthesized
  source 1..22: mol_type = other DNA
agctgctgagaattggtaataa

SEQ ID NO: 44993 - DNA, 22 bp, synthetic construct
  misc_feature 1..22: note = chemically synthesized
  source 1..22: mol_type = other DNA
ctgagaattggtaataacccca

SEQ ID NO: 44994 - DNA, 22 bp, synthetic construct
  misc_feature 1..22: note = chemically synthesized
  source 1..22: mol_type = other DNA
agaattggtaataaccccaaat

SEQ ID NO: 44995 - DNA, 22 bp, synthetic construct
  misc_feature 1..22: note = chemically synthesized
  source 1..22: mol_type = other DNA
gtaataaccccaaattatcttc

SEQ ID NO: 44996 - DNA, 22 bp, synthetic construct
  misc_feature 1..22: note = chemically synthesized
  source 1..22: mol_type = other DNA
tcttcaattctgtgaaatggaa

SEQ ID NO: 44997 - DNA, 22 bp, synthetic construct
  misc_feature 1..22: note = chemically synthesized
  source 1..22: mol_type = other DNA
caattctgtgaaatggaatttt

SEQ ID NO: 44998 - DNA, 22 bp, synthetic construct
  misc_feature 1..22: note = chemically synthesized
  source 1..22: mol_type = other DNA
aattctgtgaaatggaatttta

SEQ ID NO: 44999 - DNA, 22 bp, synthetic construct
  misc_feature 1..22: note = chemically synthesized
  source 1..22: mol_type = other DNA
tgtgaaatggaattttagacca

SEQ ID NO: 45000 - DNA, 22 bp, synthetic construct
  misc_feature 1..22: note = chemically synthesized
  source 1..22: mol_type = other DNA
tgaaatggaattttagaccagc

SEQ ID NO: 45001 - DNA, 22 bp, synthetic construct
  misc_feature 1..22: note = chemically synthesized
  source 1..22: mol_type = other DNA
tagaccagcctgtgactgaagc

SEQ ID NO: 45002 - DNA, 22 bp, synthetic construct
  misc_feature 1..22: note = chemically synthesized
  source 1..22: mol_type = other DNA
agaccagcctgtgactgaagcc

SEQ ID NO: 45003 - DNA, 22 bp, synthetic construct
  misc_feature 1..22: note = chemically synthesized
  source 1..22: mol_type = other DNA
gaccagcctgtgactgaagcca

SEQ ID NO: 45004 - DNA, 22 bp, synthetic construct
  misc_feature 1..22: note = chemically synthesized
  source 1..22: mol_type = other DNA
tgactgaagccactgggcatta

SEQ ID NO: 45005 - DNA, 22 bp, synthetic construct
  misc_feature 1..22: note = chemically synthesized
  source 1..22: mol_type = other DNA
aagccactgggcattacagtgc

SEQ ID NO: 45006 - DNA, 22 bp, synthetic construct
  misc_feature 1..22: note = chemically synthesized
  source 1..22: mol_type = other DNA
ggcattacagtgccttcgcttt

SEQ ID NO: 45007 - DNA, 22 bp, synthetic construct
  misc_feature 1..22: note = chemically synthesized
  source 1..22: mol_type = other DNA
cagtgccttcgctttgttcaac

SEQ ID NO: 45008 - DNA, 22 bp, synthetic construct
  misc_feature 1..22: note = chemically synthesized
  source 1..22: mol_type = other DNA
cgctttgttcaactgccgcatt

SEQ ID NO: 45009 - DNA, 22 bp, synthetic construct
  misc_feature 1..22: note = chemically synthesized
  source 1..22: mol_type = other DNA
gctttgttcaactgccgcattg

SEQ ID NO: 45010 - DNA, 22 bp, synthetic construct
  misc_feature 1..22: note = chemically synthesized
  source 1..22: mol_type = other DNA
tgttcaactgccgcattgtttc

SEQ ID NO: 45011 - DNA, 22 bp, synthetic construct
  misc_feature 1..22: note = chemically synthesized
  source 1..22: mol_type = other DNA
gttcaactgccgcattgtttct

SEQ ID NO: 45012 - DNA, 22 bp, synthetic construct
  misc_feature 1..22: note = chemically synthesized
  source 1..22: mol_type = other DNA
ttcaactgccgcattgtttctc

SEQ ID NO: 45013 - DNA, 22 bp, synthetic construct
  misc_feature 1..22: note = chemically synthesized
  source 1..22: mol_type = other DNA
aactgccgcattgtttctctct

SEQ ID NO: 45014 - DNA, 22 bp, synthetic construct
  misc_feature 1..22: note = chemically synthesized
  source 1..22: mol_type = other DNA
ccgcattgtttctctctgcaag

SEQ ID NO: 45015 - DNA, 22 bp, synthetic construct
  misc_feature 1..22: note = chemically synthesized
  source 1..22: mol_type = other DNA
tttctctctgcaagagaggaag

SEQ ID NO: 45016 - DNA, 22 bp, synthetic construct
  misc_feature 1..22: note = chemically synthesized
  source 1..22: mol_type = other DNA
ctctctgcaagagaggaaggaa

SEQ ID NO: 45017 - DNA, 22 bp, synthetic construct
  misc_feature 1..22: note = chemically synthesized
  source 1..22: mol_type = other DNA
tctctgcaagagaggaaggaag

SEQ ID NO: 45018 - DNA, 22 bp, synthetic construct
  misc_feature 1..22: note = chemically synthesized
  source 1..22: mol_type = other DNA
tctgcaagagaggaaggaaggc

SEQ ID NO: 45019 - DNA, 22 bp, synthetic construct
  misc_feature 1..22: note = chemically synthesized
  source 1..22: mol_type = other DNA
tgcaagagaggaaggaaggctg

SEQ ID NO: 45020 - DNA, 22 bp, synthetic construct
  misc_feature 1..22: note = chemically synthesized
  source 1..22: mol_type = other DNA
caagagaggaaggaaggctgga

SEQ ID NO: 45021 - DNA, 22 bp, synthetic construct
  misc_feature 1..22: note = chemically synthesized
  source 1..22: mol_type = other DNA
gagtacagctgagctttctggc

SEQ ID NO: 45022 - DNA, 22 bp, synthetic construct
  misc_feature 1..22: note = chemically synthesized
  source 1..22: mol_type = other DNA
agctttctggcaggcactggtg

SEQ ID NO: 45023 - DNA, 22 bp, synthetic construct
  misc_feature 1..22: note = chemically synthesized
  source 1..22: mol_type = other DNA
tctggcaggcactggtggagtt

SEQ ID NO: 45024 - DNA, 22 bp, synthetic construct
  misc_feature 1..22: note = chemically synthesized
  source 1..22: mol_type = other DNA
ctggcaggcactggtggagtta

SEQ ID NO: 45025 - DNA, 22 bp, synthetic construct
  misc_feature 1..22: note = chemically synthesized
  source 1..22: mol_type = other DNA
tggcaggcactggtggagttac

SEQ ID NO: 45026 - DNA, 22 bp, synthetic construct
  misc_feature 1..22: note = chemically synthesized
  source 1..22: mol_type = other DNA
gcaggcactggtggagttactc

SEQ ID NO: 45027 - DNA, 22 bp, synthetic construct
  misc_feature 1..22: note = chemically synthesized
  source 1..22: mol_type = other DNA
gtggagttactcattaaccttc

SEQ ID NO: 45028 - DNA, 22 bp, synthetic construct
  misc_feature 1..22: note = chemically synthesized
  source 1..22: mol_type = other DNA
ctcattaaccttccccattctt

SEQ ID NO: 45029 - DNA, 22 bp, synthetic construct
  misc_feature 1..22: note = chemically synthesized
  source 1..22: mol_type = other DNA
attaaccttccccattctttgt

SEQ ID NO: 45030 - DNA, 22 bp, synthetic construct
  misc_feature 1..22: note = chemically synthesized
  source 1..22: mol_type = other DNA
accttccccattctttgtaact

SEQ ID NO: 45031 - DNA, 22 bp, synthetic construct
  misc_feature 1..22: note = chemically synthesized
  source 1..22: mol_type = other DNA
ccccattctttgtaactggtgg

SEQ ID NO: 45032 - DNA, 22 bp, synthetic construct
  misc_feature 1..22: note = chemically synthesized
  source 1..22: mol_type = other DNA
cccattctttgtaactggtggc

SEQ ID NO: 45033 - DNA, 22 bp, synthetic construct
  misc_feature 1..22: note = chemically synthesized
  source 1..22: mol_type = other DNA
tttgtaactggtggccttagaa

SEQ ID NO: 45034 - DNA, 22 bp, synthetic construct
  misc_feature 1..22: note = chemically synthesized
  source 1..22: mol_type = other DNA
tgtaactggtggccttagaaga

SEQ ID NO: 45035 - DNA, 22 bp, synthetic construct
  misc_feature 1..22: note = chemically synthesized
  source 1..22: mol_type = other DNA
gtaactggtggccttagaagag

SEQ ID NO: 45036 - DNA, 22 bp, synthetic construct
  misc_feature 1..22: note = chemically synthesized
  source 1..22: mol_type = other DNA
taactggtggccttagaagagg

SEQ ID NO: 45037 - DNA, 22 bp, synthetic construct
  misc_feature 1..22: note = chemically synthesized
  source 1..22: mol_type = other DNA
gtggccttagaagagggttcag

SEQ ID NO: 45038 - DNA, 22 bp, synthetic construct
  misc_feature 1..22: note = chemically synthesized
  source 1..22: mol_type = other DNA
agaagagggttcagggttatgt

SEQ ID NO: 45039 - DNA, 22 bp, synthetic construct
  misc_feature 1..22: note = chemically synthesized
  source 1..22: mol_type = other DNA
gaagagggttcagggttatgtg

SEQ ID NO: 45040 - DNA, 22 bp, synthetic construct
  misc_feature 1..22: note = chemically synthesized
  source 1..22: mol_type = other DNA
agggttatgtgtttggaacacg

SEQ ID NO: 45041 - DNA, 22 bp, synthetic construct
  misc_feature 1..22: note = chemically synthesized
  source 1..22: mol_type = other DNA
tgtgtttggaacacgagttagt

SEQ ID NO: 45042 - DNA, 22 bp, synthetic construct
  misc_feature 1..22: note = chemically synthesized
  source 1..22: mol_type = other DNA
ggaacacgagttagtataaatg

SEQ ID NO: 45043 - DNA, 22 bp, synthetic construct
  misc_feature 1..22: note = chemically synthesized
  source 1..22: mol_type = other DNA
gaacacgagttagtataaatgg

SEQ ID NO: 45044 - DNA, 22 bp, synthetic construct
  misc_feature 1..22: note = chemically synthesized
  source 1..22: mol_type = other DNA
gtataaatggttctgaagcact

SEQ ID NO: 45045 - DNA, 22 bp, synthetic construct
  misc_feature 1..22: note = chemically synthesized
  source 1..22: mol_type = other DNA
tgaagcacttgattcagactgt

SEQ ID NO: 45046 - DNA, 22 bp, synthetic construct
  misc_feature 1..22: note = chemically synthesized
  source 1..22: mol_type = other DNA
aagcacttgattcagactgtgc

SEQ ID NO: 45047 - DNA, 22 bp, synthetic construct
  misc_feature 1..22: note = chemically synthesized
  source 1..22: mol_type = other DNA
gattcagactgtgctttaaaaa

SEQ ID NO: 45048 - DNA, 22 bp, synthetic construct
  misc_feature 1..22: note = chemically synthesized
  source 1..22: mol_type = other DNA
attcagactgtgctttaaaaaa

SEQ ID NO: 45049 - DNA, 22 bp, synthetic construct
  misc_feature 1..22: note = chemically synthesized
  source 1..22: mol_type = other DNA
agactgtgctttaaaaaatagg

SEQ ID NO: 45050 - DNA, 22 bp, synthetic construct
  misc_feature 1..22: note = chemically synthesized
  source 1..22: mol_type = other DNA
tgctttaaaaaataggaaagaa

SEQ ID NO: 45051 - DNA, 22 bp, synthetic construct
  misc_feature 1..22: note = chemically synthesized
  source 1..22: mol_type = other DNA
taaaaaataggaaagaaagtag

SEQ ID NO: 45052 - DNA, 22 bp, synthetic construct
  misc_feature 1..22: note = chemically synthesized
  source 1..22: mol_type = other DNA
aaaaaataggaaagaaagtaga

SEQ ID NO: 45053 - DNA, 22 bp, synthetic construct
  misc_feature 1..22: note = chemically synthesized
  source 1..22: mol_type = other DNA
aaaaataggaaagaaagtagaa

SEQ ID NO: 45054 - DNA, 22 bp, synthetic construct
  misc_feature 1..22: note = chemically synthesized
  source 1..22: mol_type = other DNA
atggtttggaagggagccacca

SEQ ID NO: 45055 - DNA, 22 bp, synthetic construct
  misc_feature 1..22: note = chemically synthesized
  source 1..22: mol_type = other DNA
ggaagggagccaccaagcacca

SEQ ID NO: 45056 - DNA, 22 bp, synthetic construct
  misc_feature 1..22: note = chemically synthesized
  source 1..22: mol_type = other DNA
gaagggagccaccaagcaccaa

SEQ ID NO: 45057 - DNA, 22 bp, synthetic construct
  misc_feature 1..22: note = chemically synthesized
  source 1..22: mol_type = other DNA
tgaatccgtttctcaatcttag

SEQ ID NO: 45058 - DNA, 22 bp, synthetic construct
  misc_feature 1..22: note = chemically synthesized
  source 1..22: mol_type = other DNA
aatccgtttctcaatcttagct

SEQ ID NO: 45059 - DNA, 22 bp, synthetic construct
  misc_feature 1..22: note = chemically synthesized
  source 1..22: mol_type = other DNA
ctcaatcttagctgcagggcat

SEQ ID NO: 45060 - DNA, 22 bp, synthetic construct
  misc_feature 1..22: note = chemically synthesized
  source 1..22: mol_type = other DNA
tcaatcttagctgcagggcatt

SEQ ID NO: 45061 - DNA, 22 bp, synthetic construct
  misc_feature 1..22: note = chemically synthesized
  source 1..22: mol_type = other DNA
aatcttagctgcagggcattgg

SEQ ID NO: 45062 - DNA, 22 bp, synthetic construct
  misc_feature 1..22: note = chemically synthesized
  source 1..22: mol_type = other DNA
agctgcagggcattggctaaag

SEQ ID NO: 45063 - DNA, 22 bp, synthetic construct
  misc_feature 1..22: note = chemically synthesized
  source 1..22: mol_type = other DNA
gctgcagggcattggctaaaga

SEQ ID NO: 45064 - DNA, 22 bp, synthetic construct
  misc_feature 1..22: note = chemically synthesized
  source 1..22: mol_type = other DNA
cagggcattggctaaagaggaa

SEQ ID NO: 45065 - DNA, 22 bp, synthetic construct
  misc_feature 1..22: note = chemically synthesized
  source 1..22: mol_type = other DNA
gctaaagaggaaggtgaaaact

SEQ ID NO: 45066 - DNA, 22 bp, synthetic construct
  misc_feature 1..22: note = chemically synthesized
  source 1..22: mol_type = other DNA
aagaggaaggtgaaaactgctg

SEQ ID NO: 45067 - DNA, 22 bp, synthetic construct
  misc_feature 1..22: note = chemically synthesized
  source 1..22: mol_type = other DNA
ctgagtcactatcaaatcaatt

SEQ ID NO: 45068 - DNA, 22 bp, synthetic construct
  misc_feature 1..22: note = chemically synthesized
  source 1..22: mol_type = other DNA
agtcactatcaaatcaattggt

SEQ ID NO: 45069 - DNA, 22 bp, synthetic construct
  misc_feature 1..22: note = chemically synthesized
  source 1..22: mol_type = other DNA
tcaaatcaattggtttttctaa

SEQ ID NO: 45070 - DNA, 22 bp, synthetic construct
  misc_feature 1..22: note = chemically synthesized
  source 1..22: mol_type = other DNA
gtttttctaatcccctgagaga

SEQ ID NO: 45071 - DNA, 22 bp, synthetic construct
  misc_feature 1..22: note = chemically synthesized
  source 1..22: mol_type = other DNA
ttctaatcccctgagagaaaaa

SEQ ID NO: 45072 - DNA, 22 bp, synthetic construct
  misc_feature 1..22: note = chemically synthesized
  source 1..22: mol_type = other DNA
tctaatcccctgagagaaaaag

SEQ ID NO: 45073 - DNA, 22 bp, synthetic construct
  misc_feature 1..22: note = chemically synthesized
  source 1..22: mol_type = other DNA
ctaatcccctgagagaaaaagt

SEQ ID NO: 45074 - DNA, 22 bp, synthetic construct
  misc_feature 1..22: note = chemically synthesized
  source 1..22: mol_type = other DNA
taatcccctgagagaaaaagta

SEQ ID NO: 45075 - DNA, 22 bp, synthetic construct
  misc_feature 1..22: note = chemically synthesized
  source 1..22: mol_type = other DNA
atcccctgagagaaaaagtaca

SEQ ID NO: 45076 - DNA, 22 bp, synthetic construct
  misc_feature 1..22: note = chemically synthesized
  source 1..22: mol_type = other DNA
agagaaaaagtacagagtttat

SEQ ID NO: 45077 - DNA, 22 bp, synthetic construct
  misc_feature 1..22: note = chemically synthesized
  source 1..22: mol_type = other DNA
attgcagctttaaaatgccatg

SEQ ID NO: 45078 - DNA, 22 bp, synthetic construct
  misc_feature 1..22: note = chemically synthesized
  source 1..22: mol_type = other DNA
ttgcagctttaaaatgccatgc

SEQ ID NO: 45079 - DNA, 22 bp, synthetic construct
  misc_feature 1..22: note = chemically synthesized
  source 1..22: mol_type = other DNA
cagctttaaaatgccatgcccc

SEQ ID NO: 45080 - DNA, 22 bp, synthetic construct
  misc_feature 1..22: note = chemically synthesized
  source 1..22: mol_type = other DNA
taaaatgccatgcccctcacgg

SEQ ID NO: 45081 - DNA, 22 bp, synthetic construct
  misc_feature 1..22: note = chemically synthesized
  source 1..22: mol_type = other DNA
aaaatgccatgcccctcacggc

SEQ ID NO: 45082 - DNA, 22 bp, synthetic construct
  misc_feature 1..22: note = chemically synthesized
  source 1..22: mol_type = other DNA
aaatgccatgcccctcacggcc

SEQ ID NO: 45083 - DNA, 22 bp, synthetic construct
  misc_feature 1..22: note = chemically synthesized
  source 1..22: mol_type = other DNA
acggccaaaggcatctgaatta

SEQ ID NO: 45084 - DNA, 22 bp, synthetic construct
  misc_feature 1..22: note = chemically synthesized
  source 1..22: mol_type = other DNA
aattaaggaagcagtattcaca

SEQ ID NO: 45085 - DNA, 22 bp, synthetic construct
  misc_feature 1..22: note = chemically synthesized
  source 1..22: mol_type = other DNA
aggaagcagtattcacagctgc

SEQ ID NO: 45086 - DNA, 22 bp, synthetic construct
  misc_feature 1..22: note = chemically synthesized
  source 1..22: mol_type = other DNA
acagctgctttctccagacatt

SEQ ID NO: 45087 - DNA, 22 bp, synthetic construct
  misc_feature 1..22: note = chemically synthesized
  source 1..22: mol_type = other DNA
ctttctccagacattgagctca

SEQ ID NO: 45088 - DNA, 22 bp, synthetic construct
  misc_feature 1..22: note = chemically synthesized
  source 1..22: mol_type = other DNA
tctccagacattgagctcaagg

SEQ ID NO: 45089 - DNA, 22 bp, synthetic construct
  misc_feature 1..22: note = chemically synthesized
  source 1..22: mol_type = other DNA
ctccagacattgagctcaagga

SEQ ID NO: 45090 - DNA, 22 bp, synthetic construct
  misc_feature 1..22: note = chemically synthesized
  source 1..22: mol_type = other DNA
tccagacattgagctcaaggac

SEQ ID NO: 45091 - DNA, 22 bp, synthetic construct
  misc_feature 1..22: note = chemically synthesized
  source 1..22: mol_type = other DNA
cagacattgagctcaaggacag

SEQ ID NO: 45092 - DNA, 22 bp, synthetic construct
  misc_feature 1..22: note = chemically synthesized
  source 1..22: mol_type = other DNA
agctcaaggacagaatctgaac

SEQ ID NO: 45093 - DNA, 22 bp, synthetic construct
  misc_feature 1..22: note = chemically synthesized
  source 1..22: mol_type = other DNA
aaggacagaatctgaactctgc

SEQ ID NO: 45094 - DNA, 22 bp, synthetic construct
  misc_feature 1..22: note = chemically synthesized
  source 1..22: mol_type = other DNA
aactctgcttttatcagctgcg

SEQ ID NO: 45095 - DNA, 22 bp, synthetic construct
  misc_feature 1..22: note = chemically synthesized
  source 1..22: mol_type = other DNA
tgcttttatcagctgcgaaaat

SEQ ID NO: 45096 - DNA, 22 bp, synthetic construct
  misc_feature 1..22: note = chemically synthesized
  source 1..22: mol_type = other DNA
cttttatcagctgcgaaaatcc

SEQ ID NO: 45097 - DNA, 22 bp, synthetic construct
  misc_feature 1..22: note = chemically synthesized
  source 1..22: mol_type = other DNA
ttatcagctgcgaaaatccaag

SEQ ID NO: 45098 - DNA, 22 bp, synthetic construct
  misc_feature 1..22: note = chemically synthesized
  source 1..22: mol_type = other DNA
tatcagctgcgaaaatccaagc

SEQ ID NO: 45099 - DNA, 22 bp, synthetic construct
  misc_feature 1..22: note = chemically synthesized
  source 1..22: mol_type = other DNA
atcagctgcgaaaatccaagca

SEQ ID NO: 45100 - DNA, 22 bp, synthetic construct
  misc_feature 1..22: note = chemically synthesized
  source 1..22: mol_type = other DNA
tcagctgcgaaaatccaagcat

SEQ ID NO: 45101 - DNA, 22 bp, synthetic construct
  misc_feature 1..22: note = chemically synthesized
  source 1..22: mol_type = other DNA
cgaaaatccaagcattcatttc

SEQ ID NO: 45102 - DNA, 22 bp, synthetic construct
  misc_feature 1..22: note = chemically synthesized
  source 1..22: mol_type = other DNA
atttccagctggttcagtgcct

SEQ ID NO: 45103 - DNA, 22 bp, synthetic construct
  misc_feature 1..22: note = chemically synthesized
  source 1..22: mol_type = other DNA
ccagctggttcagtgcctatgt

SEQ ID NO: 45104 - DNA, 22 bp, synthetic construct
  misc_feature 1..22: note = chemically synthesized
  source 1..22: mol_type = other DNA
cagctggttcagtgcctatgta

SEQ ID NO: 45105 - DNA, 22 bp, synthetic construct
  misc_feature 1..22: note = chemically synthesized
  source 1..22: mol_type = other DNA
gttcagtgcctatgtaaaagta

SEQ ID NO: 45106 - DNA, 22 bp, synthetic construct
  misc_feature 1..22: note = chemically synthesized
  source 1..22: mol_type = other DNA
agtgcctatgtaaaagtatact

SEQ ID NO: 45107 - DNA, 22 bp, synthetic construct
  misc_feature 1..22: note = chemically synthesized
  source 1..22: mol_type = other DNA
tgtaaaagtatactgtgtacaa

SEQ ID NO: 45108 - DNA, 22 bp, synthetic construct
  misc_feature 1..22: note = chemically synthesized
  source 1..22: mol_type = other DNA
tgtacaaaaataagattaaaaa

SEQ ID NO: 45109 - DNA, 22 bp, synthetic construct
  misc_feature 1..22: note = chemically synthesized
  source 1..22: mol_type = other DNA
aaaagctaacattaagcaagtg

SEQ ID NO: 45110 - DNA, 22 bp, synthetic construct
  misc_feature 1..22: note = chemically synthesized
  source 1..22: mol_type = other DNA
acattaagcaagtgtgtttgta

SEQ ID NO: 45111 - DNA, 22 bp, synthetic construct
  misc_feature 1..22: note = chemically synthesized
  source 1..22: mol_type = other DNA
agcaagtgtgtttgtatgtttt

SEQ ID NO: 45112 - DNA, 22 bp, synthetic construct
  misc_feature 1..22: note = chemically synthesized
  source 1..22: mol_type = other DNA
gtatgttttctacagttcggat

SEQ ID NO: 45113 - DNA, 22 bp, synthetic construct
  misc_feature 1..22: note = chemically synthesized
  source 1..22: mol_type = other DNA
tatgttttctacagttcggatt

SEQ ID NO: 45114 - DNA, 22 bp, synthetic construct
  misc_feature 1..22: note = chemically synthesized
  source 1..22: mol_type = other DNA
tctacagttcggatttctgaat

SEQ ID NO: 45115 - DNA, 22 bp, synthetic construct
  misc_feature 1..22: note = chemically synthesized
  source 1..22: mol_type = other DNA
ctacagttcggatttctgaata

SEQ ID NO: 45116 - DNA, 22 bp, synthetic construct
  misc_feature 1..22: note = chemically synthesized
  source 1..22: mol_type = other DNA
tacagttcggatttctgaataa

SEQ ID NO: 45117 - DNA, 22 bp, synthetic construct
  misc_feature 1..22: note = chemically synthesized
  source 1..22: mol_type = other DNA
cagttcggatttctgaataatt

SEQ ID NO: 45118 - DNA, 22 bp, synthetic construct
  misc_feature 1..22: note = chemically synthesized
  source 1..22: mol_type = other DNA
ggatttctgaataatttgatcc

SEQ ID NO: 45119 - DNA, 22 bp, synthetic construct
  misc_feature 1..22: note = chemically synthesized
  source 1..22: mol_type = other DNA
ctgaataatttgatccgacaga

SEQ ID NO: 45120 - DNA, 22 bp, synthetic construct
  misc_feature 1..22: note = chemically synthesized
  source 1..22: mol_type = other DNA
tgaataatttgatccgacagaa

SEQ ID NO: 45121 - DNA, 22 bp, synthetic construct
  misc_feature 1..22: note = chemically synthesized
  source 1..22: mol_type = other DNA
aataatttgatccgacagaaaa

SEQ ID NO: 45122 - DNA, 22 bp, synthetic construct
  misc_feature 1..22: note = chemically synthesized
  source 1..22: mol_type = other DNA
gatccgacagaaaaatatgatt

SEQ ID NO: 45123 - DNA, 22 bp, synthetic construct
  misc_feature 1..22: note = chemically synthesized
  source 1..22: mol_type = other DNA
atccgacagaaaaatatgattt

SEQ ID NO: 45124 - DNA, 22 bp, synthetic construct
  misc_feature 1..22: note = chemically synthesized
  source 1..22: mol_type = other DNA
catttcttttcgagagaattat

SEQ ID NO: 45125 - DNA, 22 bp, synthetic construct
  misc_feature 1..22: note = chemically synthesized
  source 1..22: mol_type = other DNA
atttcttttcgagagaattata

SEQ ID NO: 45126 - DNA, 22 bp, synthetic construct
  misc_feature 1..22: note = chemically synthesized
  source 1..22: mol_type = other DNA
cttttcgagagaattatatgca

SEQ ID NO: 45127 - DNA, 22 bp, synthetic construct
  misc_feature 1..22: note = chemically synthesized
  source 1..22: mol_type = other DNA
ttttcgagagaattatatgcat

SEQ ID NO: 45128 - DNA, 22 bp, synthetic construct
  misc_feature 1..22: note = chemically synthesized
  source 1..22: mol_type = other DNA
ttcgagagaattatatgcatac

SEQ ID NO: 45129 - DNA, 22 bp, synthetic construct
  misc_feature 1..22: note = chemically synthesized
  source 1..22: mol_type = other DNA
tcgagagaattatatgcatact

SEQ ID NO: 45130 - DNA, 22 bp, synthetic construct
  misc_feature 1..22: note = chemically synthesized
  source 1..22: mol_type = other DNA
cgagagaattatatgcatactt

SEQ ID NO: 45131 - DNA, 22 bp, synthetic construct
  misc_feature 1..22: note = chemically synthesized
  source 1..22: mol_type = other DNA
gagagaattatatgcatacttt

SEQ ID NO: 45132 - DNA, 22 bp, synthetic construct
  misc_feature 1..22: note = chemically synthesized
  source 1..22: mol_type = other DNA
tatgcatactttctaaatgcaa

SEQ ID NO: 45133 - DNA, 22 bp, synthetic construct
  misc_feature 1..22: note = chemically synthesized
  source 1..22: mol_type = other DNA
tctaaatgcaagaataaattcc

SEQ ID NO: 45134 - DNA, 22 bp, synthetic construct
  misc_feature 1..22: note = chemically synthesized
  source 1..22: mol_type = other DNA
ctaaatgcaagaataaattcct

SEQ ID NO: 45135 - DNA, 22 bp, synthetic construct
  misc_feature 1..22: note = chemically synthesized
  source 1..22: mol_type = other DNA
taaatgcaagaataaattcctg

SEQ ID NO: 45136 - DNA, 22 bp, synthetic construct
  misc_feature 1..22: note = chemically synthesized
  source 1..22: mol_type = other DNA
aatgcaagaataaattcctgag

SEQ ID NO: 45137 - DNA, 22 bp, synthetic construct
  misc_feature 1..22: note = chemically synthesized
  source 1..22: mol_type = other DNA
ctgagctccatgtgacttcagt

SEQ ID NO: 45138 - DNA, 22 bp, synthetic construct
  misc_feature 1..22: note = chemically synthesized
  source 1..22: mol_type = other DNA
agctccatgtgacttcagtacc

SEQ ID NO: 45139 - DNA, 22 bp, synthetic construct
  misc_feature 1..22: note = chemically synthesized
  source 1..22: mol_type = other DNA
catgtgacttcagtaccatcag

SEQ ID NO: 45140 - DNA, 22 bp, synthetic construct
  misc_feature 1..22: note = chemically synthesized
  source 1..22: mol_type = other DNA
cagtaccatcagctctttggca

SEQ ID NO: 45141 - DNA, 22 bp, synthetic construct
  misc_feature 1..22: note = chemically synthesized
  source 1..22: mol_type = other DNA
agtaccatcagctctttggcag

SEQ ID NO: 45142 - DNA, 22 bp, synthetic construct
  misc_feature 1..22: note = chemically synthesized
  source 1..22: mol_type = other DNA
tttggcagcttatgagtataca

SEQ ID NO: 45143 - DNA, 22 bp, synthetic construct
  misc_feature 1..22: note = chemically synthesized
  source 1..22: mol_type = other DNA
tggcagcttatgagtatacagc

SEQ ID NO: 45144 - DNA, 22 bp, synthetic construct
  misc_feature 1..22: note = chemically synthesized
  source 1..22: mol_type = other DNA
ggcagcttatgagtatacagct

SEQ ID NO: 45145 - DNA, 22 bp, synthetic construct
  misc_feature 1..22: note = chemically synthesized
  source 1..22: mol_type = other DNA
gcagcttatgagtatacagctt

SEQ ID NO: 45146 - DNA, 22 bp, synthetic construct
  misc_feature 1..22: note = chemically synthesized
  source 1..22: mol_type = other DNA
atgagtatacagctttttaatt

SEQ ID NO: 45147 - DNA, 22 bp, synthetic construct
  misc_feature 1..22: note = chemically synthesized
  source 1..22: mol_type = other DNA
tgagtatacagctttttaattc

SEQ ID NO: 45148 - DNA, 22 bp, synthetic construct
  misc_feature 1..22: note = chemically synthesized
  source 1..22: mol_type = other DNA
tttaattctcacctggtcccca

SEQ ID NO: 45149 - DNA, 22 bp, synthetic construct
  misc_feature 1..22: note = chemically synthesized
  source 1..22: mol_type = other DNA
ttaattctcacctggtccccag

SEQ ID NO: 45150 - DNA, 22 bp, synthetic construct
  misc_feature 1..22: note = chemically synthesized
  source 1..22: mol_type = other DNA
taattctcacctggtccccagg

SEQ ID NO: 45151 - DNA, 22 bp, synthetic construct
  misc_feature 1..22: note = chemically synthesized
  source 1..22: mol_type = other DNA
aattctcacctggtccccagga

SEQ ID NO: 45152 - DNA, 22 bp, synthetic construct
  misc_feature 1..22: note = chemically synthesized
  source 1..22: mol_type = other DNA
attctcacctggtccccaggat

SEQ ID NO: 45153 - DNA, 22 bp, synthetic construct
  misc_feature 1..22: note = chemically synthesized
  source 1..22: mol_type = other DNA
tcacctggtccccaggatatgg

SEQ ID NO: 45154 - DNA, 22 bp, synthetic construct
  misc_feature 1..22: note = chemically synthesized
  source 1..22: mol_type = other DNA
acctggtccccaggatatggtt

SEQ ID NO: 45155 - DNA, 22 bp, synthetic construct
  misc_feature 1..22: note = chemically synthesized
  source 1..22: mol_type = other DNA
gtccccaggatatggtttactt

SEQ ID NO: 45156 - DNA, 22 bp, synthetic construct
  misc_feature 1..22: note = chemically synthesized
  source 1..22: mol_type = other DNA
acttgtcagagtagttttatga

SEQ ID NO: 45157 - DNA, 22 bp, synthetic construct
  misc_feature 1..22: note = chemically synthesized
  source 1..22: mol_type = other DNA
cttgtcagagtagttttatgag

SEQ ID NO: 45158 - DNA, 22 bp, synthetic construct
  misc_feature 1..22: note = chemically synthesized
  source 1..22: mol_type = other DNA
gtcagagtagttttatgaggtg

SEQ ID NO: 45159 - DNA, 22 bp, synthetic construct
  misc_feature 1..22: note = chemically synthesized
  source 1..22: mol_type = other DNA
tcagagtagttttatgaggtgc

SEQ ID NO: 45160 - DNA, 22 bp, synthetic construct
  misc_feature 1..22: note = chemically synthesized
  source 1..22: mol_type = other DNA
tatgaggtgctttctcctgact

SEQ ID NO: 45161 - DNA, 22 bp, synthetic construct
  misc_feature 1..22: note = chemically synthesized
  source 1..22: mol_type = other DNA
atgaggtgctttctcctgactc

SEQ ID NO: 45162 - DNA, 22 bp, synthetic construct
  misc_feature 1..22: note = chemically synthesized
  source 1..22: mol_type = other DNA
tgaggtgctttctcctgactct

SEQ ID NO: 45163 - DNA, 22 bp, synthetic construct
  misc_feature 1..22: note = chemically synthesized
  source 1..22: mol_type = other DNA
tctcctgactctgattctaggt

SEQ ID NO: 45164 - DNA, 22 bp, synthetic construct
  misc_feature 1..22: note = chemically synthesized
  source 1..22: mol_type = other DNA
ctcctgactctgattctaggta

SEQ ID NO: 45165 - DNA, 22 bp, synthetic construct
  misc_feature 1..22: note = chemically synthesized
  source 1..22: mol_type = other DNA
tcctgactctgattctaggtaa

SEQ ID NO: 45166 - DNA, 22 bp, synthetic construct
  misc_feature 1..22: note = chemically synthesized
  source 1..22: mol_type = other DNA
ctgactctgattctaggtaaca

SEQ ID NO: 45167 - DNA, 22 bp, synthetic construct
  misc_feature 1..22: note = chemically synthesized
  source 1..22: mol_type = other DNA
actctgattctaggtaacacct

SEQ ID NO: 45168 - DNA, 22 bp, synthetic construct
  misc_feature 1..22: note = chemically synthesized
  source 1..22: mol_type = other DNA
tgattctaggtaacacctgatg

SEQ ID NO: 45169 - DNA, 22 bp, synthetic construct
  misc_feature 1..22: note = chemically synthesized
  source 1..22: mol_type = other DNA
attctaggtaacacctgatgag

SEQ ID NO: 45170 - DNA, 22 bp, synthetic construct
  misc_feature 1..22: note = chemically synthesized
  source 1..22: mol_type = other DNA
taggtaacacctgatgagatga

SEQ ID NO: 45171 - DNA, 22 bp, synthetic construct
  misc_feature 1..22: note = chemically synthesized
  source 1..22: mol_type = other DNA
ggtaacacctgatgagatgaac

SEQ ID NO: 45172 - DNA, 22 bp, synthetic construct
  misc_feature 1..22: note = chemically synthesized
  source 1..22: mol_type = other DNA
atgagatgaacagatggtgcac

SEQ ID NO: 45173 - DNA, 22 bp, synthetic construct
  misc_feature 1..22: note = chemically synthesized
  source 1..22: mol_type = other DNA
acttcctcttactgggcatgaa

SEQ ID NO: 45174 - DNA, 22 bp, synthetic construct
  misc_feature 1..22: note = chemically synthesized
  source 1..22: mol_type = other DNA
cctcttactgggcatgaaggaa

SEQ ID NO: 45175 - DNA, 22 bp, synthetic construct
  misc_feature 1..22: note = chemically synthesized
  source 1..22: mol_type = other DNA
ctcttactgggcatgaaggaaa

SEQ ID NO: 45176 - DNA, 22 bp, synthetic construct
  misc_feature 1..22: note = chemically synthesized
  source 1..22: mol_type = other DNA
ttactgggcatgaaggaaagag

SEQ ID NO: 45177 - DNA, 22 bp, synthetic construct
  misc_feature 1..22: note = chemically synthesized
  source 1..22: mol_type = other DNA
actgggcatgaaggaaagagag

SEQ ID NO: 45178 - DNA, 22 bp, synthetic construct
  misc_feature 1..22: note = chemically synthesized
  source 1..22: mol_type = other DNA
ctgggcatgaaggaaagagaga

SEQ ID NO: 45179 - DNA, 22 bp, synthetic construct
  misc_feature 1..22: note = chemically synthesized
  source 1..22: mol_type = other DNA
ggcatgaaggaaagagagagaa

SEQ ID NO: 45180 - DNA, 22 bp, synthetic construct
  misc_feature 1..22: note = chemically synthesized
  source 1..22: mol_type = other DNA
ctgctacattttttttttctgt

SEQ ID NO: 45181 - DNA, 22 bp, synthetic construct
  misc_feature 1..22: note = chemically synthesized
  source 1..22: mol_type = other DNA
ctacattttttttttctgtgga

SEQ ID NO: 45182 - DNA, 22 bp, synthetic construct
  misc_feature 1..22: note = chemically synthesized
  source 1..22: mol_type = other DNA
cattttttttttctgtggaaaa

SEQ ID NO: 45183 - DNA, 22 bp, synthetic construct
  misc_feature 1..22: note = chemically synthesized
  source 1..22: mol_type = other DNA
tttttttctgtggaaaaagagt

SEQ ID NO: 45184 - DNA, 22 bp, synthetic construct
  misc_feature 1..22: note = chemically synthesized
  source 1..22: mol_type = other DNA
ttttttctgtggaaaaagagtc

SEQ ID NO: 45185 - DNA, 22 bp, synthetic construct
  misc_feature 1..22: note = chemically synthesized
  source 1..22: mol_type = other DNA
tttttctgtggaaaaagagtct

SEQ ID NO: 45186 - DNA, 22 bp, synthetic construct
  misc_feature 1..22: note = chemically synthesized
  source 1..22: mol_type = other DNA
ttttctgtggaaaaagagtcta

SEQ ID NO: 45187 - DNA, 22 bp, synthetic construct
  misc_feature 1..22: note = chemically synthesized
  source 1..22: mol_type = other DNA
tttctgtggaaaaagagtctaa

SEQ ID NO: 45188 - DNA, 22 bp, synthetic construct
  misc_feature 1..22: note = chemically synthesized
  source 1..22: mol_type = other DNA
ttctgtggaaaaagagtctaat

SEQ ID NO: 45189 - DNA, 22 bp, synthetic construct
  misc_feature 1..22: note = chemically synthesized
  source 1..22: mol_type = other DNA
tctgtggaaaaagagtctaata

SEQ ID NO: 45190 - DNA, 22 bp, synthetic construct
  misc_feature 1..22: note = chemically synthesized
  source 1..22: mol_type = other DNA
ctgtggaaaaagagtctaatat

SEQ ID NO: 45191 - DNA, 22 bp, synthetic construct
  misc_feature 1..22: note = chemically synthesized
  source 1..22: mol_type = other DNA
tgtggaaaaagagtctaatatt

SEQ ID NO: 45192 - DNA, 22 bp, synthetic construct
  misc_feature 1..22: note = chemically synthesized
  source 1..22: mol_type = other DNA
tggaaaaagagtctaatatttc

SEQ ID NO: 45193 - DNA, 22 bp, synthetic construct
  misc_feature 1..22: note = chemically synthesized
  source 1..22: mol_type = other DNA
atatttctaattaaccttgatg

SEQ ID NO: 45194 - DNA, 22 bp, synthetic construct
  misc_feature 1..22: note = chemically synthesized
  source 1..22: mol_type = other DNA
ctaattaaccttgatgggaaca

SEQ ID NO: 45195 - DNA, 22 bp, synthetic construct
  misc_feature 1..22: note = chemically synthesized
  source 1..22: mol_type = other DNA
taattaaccttgatgggaacat

SEQ ID NO: 45196 - DNA, 22 bp, synthetic construct
  misc_feature 1..22: note = chemically synthesized
  source 1..22: mol_type = other DNA
attaaccttgatgggaacatag

SEQ ID NO: 45197 - DNA, 22 bp, synthetic construct
  misc_feature 1..22: note = chemically synthesized
  source 1..22: mol_type = other DNA
accttgatgggaacatagaaca

SEQ ID NO: 45198 - DNA, 22 bp, synthetic construct
  misc_feature 1..22: note = chemically synthesized
  source 1..22: mol_type = other DNA
gatgggaacatagaacatagat

SEQ ID NO: 45199 - DNA, 22 bp, synthetic construct
  misc_feature 1..22: note = chemically synthesized
  source 1..22: mol_type = other DNA
atgggaacatagaacatagatt

SEQ ID NO: 45200 - DNA, 22 bp, synthetic construct
  misc_feature 1..22: note = chemically synthesized
  source 1..22: mol_type = other DNA
taaagggaacttgcacattatc

SEQ ID NO: 45201 - DNA, 22 bp, synthetic construct
  misc_feature 1..22: note = chemically synthesized
  source 1..22: mol_type = other DNA
gcacattatcgcagtaggctga

SEQ ID NO: 45202 - DNA, 22 bp, synthetic construct
  misc_feature 1..22: note = chemically synthesized
  source 1..22: mol_type = other DNA
cacattatcgcagtaggctgaa

SEQ ID NO: 45203 - DNA, 22 bp, synthetic construct
  misc_feature 1..22: note = chemically synthesized
  source 1..22: mol_type = other DNA
tcgcagtaggctgaataatggc

SEQ ID NO: 45204 - DNA, 22 bp, synthetic construct
  misc_feature 1..22: note = chemically synthesized
  source 1..22: mol_type = other DNA
aataatggctaatggctcactc

SEQ ID NO: 45205 - DNA, 22 bp, synthetic construct
  misc_feature 1..22: note = chemically synthesized
  source 1..22: mol_type = other DNA
atggctcactctgaaagatatg

SEQ ID NO: 45206 - DNA, 22 bp, synthetic construct
  misc_feature 1..22: note = chemically synthesized
  source 1..22: mol_type = other DNA
actctgaaagatatgtatggct

SEQ ID NO: 45207 - DNA, 22 bp, synthetic construct
  misc_feature 1..22: note = chemically synthesized
  source 1..22: mol_type = other DNA
tgaaagatatgtatggcttaac

SEQ ID NO: 45208 - DNA, 22 bp, synthetic construct
  misc_feature 1..22: note = chemically synthesized
  source 1..22: mol_type = other DNA
aaagatatgtatggcttaaccc

SEQ ID NO: 45209 - DNA, 22 bp, synthetic construct
  misc_feature 1..22: note = chemically synthesized
  source 1..22: mol_type = other DNA
aacccctgaaacctgtgagtat

SEQ ID NO: 45210 - DNA, 22 bp, synthetic construct
  misc_feature 1..22: note = chemically synthesized
  source 1..22: mol_type = other DNA
acccctgaaacctgtgagtatt

SEQ ID NO: 45211 - DNA, 22 bp, synthetic construct
  misc_feature 1..22: note = chemically synthesized
  source 1..22: mol_type = other DNA
aaacctgtgagtattatctttt

SEQ ID NO: 45212 - DNA, 22 bp, synthetic construct
  misc_feature 1..22: note = chemically synthesized
  source 1..22: mol_type = other DNA
tgagtattatcttttctagcca

SEQ ID NO: 45213 - DNA, 22 bp, synthetic construct
  misc_feature 1..22: note = chemically synthesized
  source 1..22: mol_type = other DNA
tcttttctagccaaacagactt

SEQ ID NO: 45214 - DNA, 22 bp, synthetic construct
  misc_feature 1..22: note = chemically synthesized
  source 1..22: mol_type = other DNA
ttctagccaaacagacttttgc

SEQ ID NO: 45215 - DNA, 22 bp, synthetic construct
  misc_feature 1..22: note = chemically synthesized
  source 1..22: mol_type = other DNA
tctagccaaacagacttttgca

SEQ ID NO: 45216 - DNA, 22 bp, synthetic construct
  misc_feature 1..22: note = chemically synthesized
  source 1..22: mol_type = other DNA
ctagccaaacagacttttgcat

SEQ ID NO: 45217 - DNA, 22 bp, synthetic construct
  misc_feature 1..22: note = chemically synthesized
  source 1..22: mol_type = other DNA
tagccaaacagacttttgcata

SEQ ID NO: 45218 - DNA, 22 bp, synthetic construct
  misc_feature 1..22: note = chemically synthesized
  source 1..22: mol_type = other DNA
gccaaacagacttttgcatata

SEQ ID NO: 45219 - DNA, 22 bp, synthetic construct
  misc_feature 1..22: note = chemically synthesized
  source 1..22: mol_type = other DNA
ttgcatatataattaaggatct

SEQ ID NO: 45220 - DNA, 22 bp, synthetic construct
  misc_feature 1..22: note = chemically synthesized
  source 1..22: mol_type = other DNA
tgcatatataattaaggatctt

SEQ ID NO: 45221 - DNA, 22 bp, synthetic construct
  misc_feature 1..22: note = chemically synthesized
  source 1..22: mol_type = other DNA
gcatatataattaaggatcttg

SEQ ID NO: 45222 - DNA, 22 bp, synthetic construct
  misc_feature 1..22: note = chemically synthesized
  source 1..22: mol_type = other DNA
catatataattaaggatcttgg

SEQ ID NO: 45223 - DNA, 22 bp, synthetic construct
  misc_feature 1..22: note = chemically synthesized
  source 1..22: mol_type = other DNA
aggatcttgggatggggagata

SEQ ID NO: 45224 - DNA, 22 bp, synthetic construct
  misc_feature 1..22: note = chemically synthesized
  source 1..22: mol_type = other DNA
gggatggggagatatcctaatt

SEQ ID NO: 45225 - DNA, 22 bp, synthetic construct
  misc_feature 1..22: note = chemically synthesized
  source 1..22: mol_type = other DNA
ggatggggagatatcctaatta

SEQ ID NO: 45226 - DNA, 22 bp, synthetic construct
  misc_feature 1..22: note = chemically synthesized
  source 1..22: mol_type = other DNA
attatttgggtgtatcctaaat

SEQ ID NO: 45227 - DNA, 22 bp, synthetic construct
  misc_feature 1..22: note = chemically synthesized
  source 1..22: mol_type = other DNA
tttgggtgtatcctaaatgtaa

SEQ ID NO: 45228 - DNA, 22 bp, synthetic construct
  misc_feature 1..22: note = chemically synthesized
  source 1..22: mol_type = other DNA
gggtgtatcctaaatgtaatca

SEQ ID NO: 45229 - DNA, 22 bp, synthetic construct
  misc_feature 1..22: note = chemically synthesized
  source 1..22: mol_type = other DNA
ggtgtatcctaaatgtaatcac

SEQ ID NO: 45230 - DNA, 22 bp, synthetic construct
  misc_feature 1..22: note = chemically synthesized
  source 1..22: mol_type = other DNA
aatgtaatcacaagtgtcatta

SEQ ID NO: 45231 - DNA, 22 bp, synthetic construct
  misc_feature 1..22: note = chemically synthesized
  source 1..22: mol_type = other DNA
taagagggaggcaaagggagat

SEQ ID NO: 45232 - DNA, 22 bp, synthetic construct
  misc_feature 1..22: note = chemically synthesized
  source 1..22: mol_type = other DNA
gacttataagaggagaaaatgt

SEQ ID NO: 45233 - DNA, 22 bp, synthetic construct
  misc_feature 1..22: note = chemically synthesized
  source 1..22: mol_type = other DNA
acttataagaggagaaaatgtg

SEQ ID NO: 45234 - DNA, 22 bp, synthetic construct
  misc_feature 1..22: note = chemically synthesized
  source 1..22: mol_type = other DNA
ataagaggagaaaatgtgacgt

SEQ ID NO: 45235 - DNA, 22 bp, synthetic construct
  misc_feature 1..22: note = chemically synthesized
  source 1..22: mol_type = other DNA
taagaggagaaaatgtgacgtg

SEQ ID NO: 45236 - DNA, 22 bp, synthetic construct
  misc_feature 1..22: note = chemically synthesized
  source 1..22: mol_type = other DNA
caaaagcagagatacatttttt

SEQ ID NO: 45237 - DNA, 22 bp, synthetic construct
  misc_feature 1..22: note = chemically synthesized
  source 1..22: mol_type = other DNA
ttttgaagatcgaggaagaggc

SEQ ID NO: 45238 - DNA, 22 bp, synthetic construct
  misc_feature 1..22: note = chemically synthesized
  source 1..22: mol_type = other DNA
tttgaagatcgaggaagaggct

SEQ ID NO: 45239 - DNA, 22 bp, synthetic construct
  misc_feature 1..22: note = chemically synthesized
  source 1..22: mol_type = other DNA
ttgaagatcgaggaagaggcta

SEQ ID NO: 45240 - DNA, 22 bp, synthetic construct
  misc_feature 1..22: note = chemically synthesized
  source 1..22: mol_type = other DNA
tgaagatcgaggaagaggctac

SEQ ID NO: 45241 - DNA, 22 bp, synthetic construct
  misc_feature 1..22: note = chemically synthesized
  source 1..22: mol_type = other DNA
gaagatcgaggaagaggctaca

SEQ ID NO: 45242 - DNA, 22 bp, synthetic construct
  misc_feature 1..22: note = chemically synthesized
  source 1..22: mol_type = other DNA
aagatcgaggaagaggctacaa

SEQ ID NO: 45243 - DNA, 22 bp, synthetic construct
  misc_feature 1..22: note = chemically synthesized
  source 1..22: mol_type = other DNA
caaaccaaggaatgtgggtagc

SEQ ID NO: 45244 - DNA, 22 bp, synthetic construct
  misc_feature 1..22: note = chemically synthesized
  source 1..22: mol_type = other DNA
tagaagaggaaacagaatccat

SEQ ID NO: 45245 - DNA, 22 bp, synthetic construct
  misc_feature 1..22: note = chemically synthesized
  source 1..22: mol_type = other DNA
gaagaggaaacagaatccatgg

SEQ ID NO: 45246 - DNA, 22 bp, synthetic construct
  misc_feature 1..22: note = chemically synthesized
  source 1..22: mol_type = other DNA
tcatagagtctccagaagaaac

SEQ ID NO: 45247 - DNA, 22 bp, synthetic construct
  misc_feature 1..22: note = chemically synthesized
  source 1..22: mol_type = other DNA
atagagtctccagaagaaacag

SEQ ID NO: 45248 - DNA, 22 bp, synthetic construct
  misc_feature 1..22: note = chemically synthesized
  source 1..22: mol_type = other DNA
cagaagaaacagccacactgac

SEQ ID NO: 45249 - DNA, 22 bp, synthetic construct
  misc_feature 1..22: note = chemically synthesized
  source 1..22: mol_type = other DNA
acacctcgactttagcccagtg

SEQ ID NO: 45250 - DNA, 22 bp, synthetic construct
  misc_feature 1..22: note = chemically synthesized
  source 1..22: mol_type = other DNA
gactttagcccagtgaaaccga

SEQ ID NO: 45251 - DNA, 22 bp, synthetic construct
  misc_feature 1..22: note = chemically synthesized
  source 1..22: mol_type = other DNA
tagcccagtgaaaccgatttca

SEQ ID NO: 45252 - DNA, 22 bp, synthetic construct
  misc_feature 1..22: note = chemically synthesized
  source 1..22: mol_type = other DNA
agcccagtgaaaccgatttcag

SEQ ID NO: 45253 - DNA, 22 bp, synthetic construct
  misc_feature 1..22: note = chemically synthesized
  source 1..22: mol_type = other DNA
gcccagtgaaaccgatttcaga

SEQ ID NO: 45254 - DNA, 22 bp, synthetic construct
  misc_feature 1..22: note = chemically synthesized
  source 1..22: mol_type = other DNA
cagacttctgacctccacaact

SEQ ID NO: 45255 - DNA, 22 bp, synthetic construct
  misc_feature 1..22: note = chemically synthesized
  source 1..22: mol_type = other DNA
agacttctgacctccacaactt

SEQ ID NO: 45256 - DNA, 22 bp, synthetic construct
  misc_feature 1..22: note = chemically synthesized
  source 1..22: mol_type = other DNA
ctgacctccacaacttcaagat

SEQ ID NO: 45257 - DNA, 22 bp, synthetic construct
  misc_feature 1..22: note = chemically synthesized
  source 1..22: mol_type = other DNA
tgacctccacaacttcaagata

SEQ ID NO: 45258 - DNA, 22 bp, synthetic construct
  misc_feature 1..22: note = chemically synthesized
  source 1..22: mol_type = other DNA
acctccacaacttcaagataat

SEQ ID NO: 45259 - DNA, 22 bp, synthetic construct
  misc_feature 1..22: note = chemically synthesized
  source 1..22: mol_type = other DNA
cacaacttcaagataatacatt

SEQ ID NO: 45260 - DNA, 22 bp, synthetic construct
  misc_feature 1..22: note = chemically synthesized
  source 1..22: mol_type = other DNA
caagataatacatttgtgttgt

SEQ ID NO: 45261 - DNA, 22 bp, synthetic construct
  misc_feature 1..22: note = chemically synthesized
  source 1..22: mol_type = other DNA
aagataatacatttgtgttgtt

SEQ ID NO: 45262 - DNA, 22 bp, synthetic construct
  misc_feature 1..22: note = chemically synthesized
  source 1..22: mol_type = other DNA
gtgttgttttaagccaataaat

SEQ ID NO: 45263 - DNA, 22 bp, synthetic construct
  misc_feature 1..22: note = chemically synthesized
  source 1..22: mol_type = other DNA
tgttgttttaagccaataaatt

SEQ ID NO: 45264 - DNA, 22 bp, synthetic construct
  misc_feature 1..22: note = chemically synthesized
  source 1..22: mol_type = other DNA
ttttaagccaataaatttgtgg

SEQ ID NO: 45265 - DNA, 22 bp, synthetic construct
  misc_feature 1..22: note = chemically synthesized
  source 1..22: mol_type = other DNA
taagccaataaatttgtggtaa

SEQ ID NO: 45266 - DNA, 22 bp, synthetic construct
  misc_feature 1..22: note = chemically synthesized
  source 1..22: mol_type = other DNA
aagccaataaatttgtggtaat

SEQ ID NO: 45267 - DNA, 22 bp, synthetic construct
  misc_feature 1..22: note = chemically synthesized
  source 1..22: mol_type = other DNA
agccaataaatttgtggtaatt

SEQ ID NO: 45268 - DNA, 22 bp, synthetic construct
  misc_feature 1..22: note = chemically synthesized
  source 1..22: mol_type = other DNA
gtggtaattttttacagcagca

SEQ ID NO: 45269 - DNA, 22 bp, synthetic construct
  misc_feature 1..22: note = chemically synthesized
  source 1..22: mol_type = other DNA
tggtaattttttacagcagcaa

SEQ ID NO: 45270 - DNA, 22 bp, synthetic construct
  misc_feature 1..22: note = chemically synthesized
  source 1..22: mol_type = other DNA
tttacagcagcaagaggaaatc

SEQ ID NO: 45271 - DNA, 22 bp, synthetic construct
  misc_feature 1..22: note = chemically synthesized
  source 1..22: mol_type = other DNA
ttacagcagcaagaggaaatca

SEQ ID NO: 45272 - DNA, 22 bp, synthetic construct
  misc_feature 1..22: note = chemically synthesized
  source 1..22: mol_type = other DNA
tacagcagcaagaggaaatcag

SEQ ID NO: 45273 - DNA, 22 bp, synthetic construct
  misc_feature 1..22: note = chemically synthesized
  source 1..22: mol_type = other DNA
acagcagcaagaggaaatcagt

SEQ ID NO: 45274 - DNA, 22 bp, synthetic construct
  misc_feature 1..22: note = chemically synthesized
  source 1..22: mol_type = other DNA
cagcagcaagaggaaatcagtt

SEQ ID NO: 45275 - DNA, 22 bp, synthetic construct
  misc_feature 1..22: note = chemically synthesized
  source 1..22: mol_type = other DNA
cgtagaatagtaggtcctgtct

SEQ ID NO: 45276 - DNA, 22 bp, synthetic construct
  misc_feature 1..22: note = chemically synthesized
  source 1..22: mol_type = other DNA
tctctggctaatcattagaatc

SEQ ID NO: 45277 - DNA, 22 bp, synthetic construct
  misc_feature 1..22: note = chemically synthesized
  source 1..22: mol_type = other DNA
tggctaatcattagaatcactc

SEQ ID NO: 45278 - DNA, 22 bp, synthetic construct
  misc_feature 1..22: note = chemically synthesized
  source 1..22: mol_type = other DNA
gctaatcattagaatcactcca

SEQ ID NO: 45279 - DNA, 22 bp, synthetic construct
  misc_feature 1..22: note = chemically synthesized
  source 1..22: mol_type = other DNA
atcattagaatcactccagaag

SEQ ID NO: 45280 - DNA, 22 bp, synthetic construct
  misc_feature 1..22: note = chemically synthesized
  source 1..22: mol_type = other DNA
gaatcactccagaagcttgtta

SEQ ID NO: 45281 - DNA, 22 bp, synthetic construct
  misc_feature 1..22: note = chemically synthesized
  source 1..22: mol_type = other DNA
cagaagcttgttacatacagac

SEQ ID NO: 45282 - DNA, 22 bp, synthetic construct
  misc_feature 1..22: note = chemically synthesized
  source 1..22: mol_type = other DNA
gttacatacagacccagagcca

SEQ ID NO: 45283 - DNA, 22 bp, synthetic construct
  misc_feature 1..22: note = chemically synthesized
  source 1..22: mol_type = other DNA
ttacatacagacccagagccag

SEQ ID NO: 45284 - DNA, 22 bp, synthetic construct
  misc_feature 1..22: note = chemically synthesized
  source 1..22: mol_type = other DNA
catacagacccagagccagtga

SEQ ID NO: 45285 - DNA, 22 bp, synthetic construct
  misc_feature 1..22: note = chemically synthesized
  source 1..22: mol_type = other DNA
ggtggtggggcccagagcctga

SEQ ID NO: 45286 - DNA, 22 bp, synthetic construct
  misc_feature 1..22: note = chemically synthesized
  source 1..22: mol_type = other DNA
gtggtggggcccagagcctgaa

SEQ ID NO: 45287 - DNA, 22 bp, synthetic construct
  misc_feature 1..22: note = chemically synthesized
  source 1..22: mol_type = other DNA
aatattaagcaagttcttcgtt

SEQ ID NO: 45288 - DNA, 22 bp, synthetic construct
  misc_feature 1..22: note = chemically synthesized
  source 1..22: mol_type = other DNA
agcaagttcttcgttttagaaa

SEQ ID NO: 45289 - DNA, 22 bp, synthetic construct
  misc_feature 1..22: note = chemically synthesized
  source 1..22: mol_type = other DNA
ttcgttttagaaatgaggaaac

SEQ ID NO: 45290 - DNA, 22 bp, synthetic construct
  misc_feature 1..22: note = chemically synthesized
  source 1..22: mol_type = other DNA
cgttttagaaatgaggaaacca

SEQ ID NO: 45291 - DNA, 22 bp, synthetic construct
  misc_feature 1..22: note = chemically synthesized
  source 1..22: mol_type = other DNA
gttttagaaatgaggaaaccaa

SEQ ID NO: 45292 - DNA, 22 bp, synthetic construct
  misc_feature 1..22: note = chemically synthesized
  source 1..22: mol_type = other DNA
tagaaatgaggaaaccaaggtt

SEQ ID NO: 45293 - DNA, 22 bp, synthetic construct
  misc_feature 1..22: note = chemically synthesized
  source 1..22: mol_type = other DNA
agaaatgaggaaaccaaggttg

SEQ ID NO: 45294 - DNA, 22 bp, synthetic construct
  misc_feature 1..22: note = chemically synthesized
  source 1..22: mol_type = other DNA
gaaatgaggaaaccaaggttgg

SEQ ID NO: 45295 - DNA, 22 bp, synthetic construct
  misc_feature 1..22: note = chemically synthesized
  source 1..22: mol_type = other DNA
ggagaagctaagcaacttactc

SEQ ID NO: 45296 - DNA, 22 bp, synthetic construct
  misc_feature 1..22: note = chemically synthesized
  source 1..22: mol_type = other DNA
agcaacttactcaaatacatag

SEQ ID NO: 45297 - DNA, 22 bp, synthetic construct
  misc_feature 1..22: note = chemically synthesized
  source 1..22: mol_type = other DNA
actcaaatacatagggtatttc

SEQ ID NO: 45298 - DNA, 22 bp, synthetic construct
  misc_feature 1..22: note = chemically synthesized
  source 1..22: mol_type = other DNA
ctcaaatacatagggtatttca

SEQ ID NO: 45299 - DNA, 22 bp, synthetic construct
  misc_feature 1..22: note = chemically synthesized
  source 1..22: mol_type = other DNA
aaatacatagggtatttcattt

SEQ ID NO: 45300 - DNA, 22 bp, synthetic construct
  misc_feature 1..22: note = chemically synthesized
  source 1..22: mol_type = other DNA
cattttaaatttaattttatta

SEQ ID NO: 45301 - DNA, 22 bp, synthetic construct
  misc_feature 1..22: note = chemically synthesized
  source 1..22: mol_type = other DNA
attttaaatttaattttattac

SEQ ID NO: 45302 - DNA, 22 bp, synthetic construct
  misc_feature 1..22: note = chemically synthesized
  source 1..22: mol_type = other DNA
taaatttaattttattacttta

SEQ ID NO: 45303 - DNA, 22 bp, synthetic construct
  misc_feature 1..22: note = chemically synthesized
  source 1..22: mol_type = other DNA
aaatttaattttattactttat

SEQ ID NO: 45304 - DNA, 22 bp, synthetic construct
  misc_feature 1..22: note = chemically synthesized
  source 1..22: mol_type = other DNA
aatttaattttattactttatc

SEQ ID NO: 45305 - DNA, 22 bp, synthetic construct
  misc_feature 1..22: note = chemically synthesized
  source 1..22: mol_type = other DNA
aattttattactttatcttttg

SEQ ID NO: 45306 - DNA, 22 bp, synthetic construct
  misc_feature 1..22: note = chemically synthesized
  source 1..22: mol_type = other DNA
attttattactttatcttttga

SEQ ID NO: 45307 - DNA, 22 bp, synthetic construct
  misc_feature 1..22: note = chemically synthesized
  source 1..22: mol_type = other DNA
tattactttatcttttgaattt

SEQ ID NO: 45308 - DNA, 22 bp, synthetic construct
  misc_feature 1..22: note = chemically synthesized
  source 1..22: mol_type = other DNA
attactttatcttttgaatttt

SEQ ID NO: 45309 - DNA, 22 bp, synthetic construct
  misc_feature 1..22: note = chemically synthesized
  source 1..22: mol_type = other DNA
ttactttatcttttgaattttc

SEQ ID NO: 45310 - DNA, 22 bp, synthetic construct
  misc_feature 1..22: note = chemically synthesized
  source 1..22: mol_type = other DNA
ctttatcttttgaattttctta

SEQ ID NO: 45311 - DNA, 22 bp, synthetic construct
  misc_feature 1..22: note = chemically synthesized
  source 1..22: mol_type = other DNA
tatcttttgaattttcttaccc

SEQ ID NO: 45312 - DNA, 22 bp, synthetic construct
  misc_feature 1..22: note = chemically synthesized
  source 1..22: mol_type = other DNA
atcttttgaattttcttacccc

SEQ ID NO: 45313 - DNA, 22 bp, synthetic construct
  misc_feature 1..22: note = chemically synthesized
  source 1..22: mol_type = other DNA
tcttttgaattttcttacccca

SEQ ID NO: 45314 - DNA, 22 bp, synthetic construct
  misc_feature 1..22: note = chemically synthesized
  source 1..22: mol_type = other DNA
ttgaattttcttaccccagttg

SEQ ID NO: 45315 - DNA, 22 bp, synthetic construct
  misc_feature 1..22: note = chemically synthesized
  source 1..22: mol_type = other DNA
tgaattttcttaccccagttgt

SEQ ID NO: 45316 - DNA, 22 bp, synthetic construct
  misc_feature 1..22: note = chemically synthesized
  source 1..22: mol_type = other DNA
gaattttcttaccccagttgta

SEQ ID NO: 45317 - DNA, 22 bp, synthetic construct
  misc_feature 1..22: note = chemically synthesized
  source 1..22: mol_type = other DNA
aattttcttaccccagttgtac

SEQ ID NO: 45318 - DNA, 22 bp, synthetic construct
  misc_feature 1..22: note = chemically synthesized
  source 1..22: mol_type = other DNA
tcttaccccagttgtacttttg

SEQ ID NO: 45319 - DNA, 22 bp, synthetic construct
  misc_feature 1..22: note = chemically synthesized
  source 1..22: mol_type = other DNA
cttaccccagttgtacttttgt

SEQ ID NO: 45320 - DNA, 22 bp, synthetic construct
  misc_feature 1..22: note = chemically synthesized
  source 1..22: mol_type = other DNA
ttaccccagttgtacttttgtg

SEQ ID NO: 45321 - DNA, 22 bp, synthetic construct
  misc_feature 1..22: note = chemically synthesized
  source 1..22: mol_type = other DNA
accccagttgtacttttgtgta

SEQ ID NO: 45322 - DNA, 22 bp, synthetic construct
  misc_feature 1..22: note = chemically synthesized
  source 1..22: mol_type = other DNA
ccccagttgtacttttgtgtaa

SEQ ID NO: 45323 - DNA, 22 bp, synthetic construct
  misc_feature 1..22: note = chemically synthesized
  source 1..22: mol_type = other DNA
tacttttgtgtaaatgtgattt

SEQ ID NO: 45324 - DNA, 22 bp, synthetic construct
  misc_feature 1..22: note = chemically synthesized
  source 1..22: mol_type = other DNA
ttgtgtaaatgtgatttcattt

SEQ ID NO: 45325 - DNA, 22 bp, synthetic construct
  misc_feature 1..22: note = chemically synthesized
  source 1..22: mol_type = other DNA
tgtgtaaatgtgatttcattta

SEQ ID NO: 45326 - DNA, 22 bp, synthetic construct
  misc_feature 1..22: note = chemically synthesized
  source 1..22: mol_type = other DNA
gtgtaaatgtgatttcatttac

SEQ ID NO: 45327 - DNA, 22 bp, synthetic construct
  misc_feature 1..22: note = chemically synthesized
  source 1..22: mol_type = other DNA
tgtaaatgtgatttcatttacg

SEQ ID NO: 45328 - DNA, 22 bp, synthetic construct
  misc_feature 1..22: note = chemically synthesized
  source 1..22: mol_type = other DNA
catttacggctttgtgttgaca

SEQ ID NO: 45329 - DNA, 22 bp, synthetic construct
  misc_feature 1..22: note = chemically synthesized
  source 1..22: mol_type = other DNA
atttacggctttgtgttgacat

SEQ ID NO: 45330 - DNA, 22 bp, synthetic construct
  misc_feature 1..22: note = chemically synthesized
  source 1..22: mol_type = other DNA
acggctttgtgttgacatattc

SEQ ID NO: 45331 - DNA, 22 bp, synthetic construct
  misc_feature 1..22: note = chemically synthesized
  source 1..22: mol_type = other DNA
cggctttgtgttgacatattca

SEQ ID NO: 45332 - DNA, 22 bp, synthetic construct
  misc_feature 1..22: note = chemically synthesized
  source 1..22: mol_type = other DNA
tgtgttgacatattcattaaaa

SEQ ID NO: 45333 - DNA, 22 bp, synthetic construct
  misc_feature 1..22: note = chemically synthesized
  source 1..22: mol_type = other DNA
gtgttgacatattcattaaaat

SEQ ID NO: 45334 - DNA, 22 bp, synthetic construct
  misc_feature 1..22: note = chemically synthesized
  source 1..22: mol_type = other DNA
tgttgacatattcattaaaatg

SEQ ID NO: 45335 - DNA, 22 bp, synthetic construct
  misc_feature 1..22: note = chemically synthesized
  source 1..22: mol_type = other DNA
acatattcattaaaatgaagaa

SEQ ID NO: 45336 - DNA, 22 bp, synthetic construct
  misc_feature 1..22: note = chemically synthesized
  source 1..22: mol_type = other DNA
attaaaatgaagaaataaaaga

SEQ ID NO: 45337 - DNA, 22 bp, synthetic construct
  misc_feature 1..22: note = chemically synthesized
  source 1..22: mol_type = other DNA
aaatgaagaaataaaagatgag

SEQ ID NO: 45338 - DNA, 22 bp, synthetic construct
  misc_feature 1..22: note = chemically synthesized
  source 1..22: mol_type = other DNA
taaaaattatataatgtttatt

SEQ ID NO: 45339 - DNA, 22 bp, synthetic construct
  misc_feature 1..22: note = chemically synthesized
  source 1..22: mol_type = other DNA
aaaaattatataatgtttattg

SEQ ID NO: 45340 - DNA, 22 bp, synthetic construct
  misc_feature 1..22: note = chemically synthesized
  source 1..22: mol_type = other DNA
aaaattatataatgtttattga

SEQ ID NO: 45341 - DNA, 22 bp, synthetic construct
  misc_feature 1..22: note = chemically synthesized
  source 1..22: mol_type = other DNA
tataatgtttattgattagaat

SEQ ID NO: 45342 - DNA, 22 bp, synthetic construct
  misc_feature 1..22: note = chemically synthesized
  source 1..22: mol_type = other DNA
attgattagaatgaatatgatg

SEQ ID NO: 45343 - DNA, 22 bp, synthetic construct
  misc_feature 1..22: note = chemically synthesized
  source 1..22: mol_type = other DNA
ttgattagaatgaatatgatgc

SEQ ID NO: 45344 - DNA, 22 bp, synthetic construct
  misc_feature 1..22: note = chemically synthesized
  source 1..22: mol_type = other DNA
attagaatgaatatgatgcaat

SEQ ID NO: 45345 - DNA, 22 bp, synthetic construct
  misc_feature 1..22: note = chemically synthesized
  source 1..22: mol_type = other DNA
gaatgaatatgatgcaatctgg

SEQ ID NO: 45346 - DNA, 22 bp, synthetic construct
  misc_feature 1..22: note = chemically synthesized
  source 1..22: mol_type = other DNA
gttttctgtgttcagattcctg

SEQ ID NO: 45347 - DNA, 22 bp, synthetic construct
  misc_feature 1..22: note = chemically synthesized
  source 1..22: mol_type = other DNA
tctgtgttcagattcctgacct

SEQ ID NO: 45348 - DNA, 22 bp, synthetic construct
  misc_feature 1..22: note = chemically synthesized
  source 1..22: mol_type = other DNA
ctgtgttcagattcctgacctc

SEQ ID NO: 45349 - DNA, 22 bp, synthetic construct
  misc_feature 1..22: note = chemically synthesized
  source 1..22: mol_type = other DNA
tgtgttcagattcctgacctct

SEQ ID NO: 45350 - DNA, 22 bp, synthetic construct
  misc_feature 1..22: note = chemically synthesized
  source 1..22: mol_type = other DNA
tgttcagattcctgacctctgg

SEQ ID NO: 45351 - DNA, 22 bp, synthetic construct
  misc_feature 1..22: note = chemically synthesized
  source 1..22: mol_type = other DNA
agattcctgacctctggagtta

SEQ ID NO: 45352 - DNA, 22 bp, synthetic construct
  misc_feature 1..22: note = chemically synthesized
  source 1..22: mol_type = other DNA
ctgacctctggagttaaccttt

SEQ ID NO: 45353 - DNA, 22 bp, synthetic construct
  misc_feature 1..22: note = chemically synthesized
  source 1..22: mol_type = other DNA
acctctggagttaacctttctt

SEQ ID NO: 45354 - DNA, 22 bp, synthetic construct
  misc_feature 1..22: note = chemically synthesized
  source 1..22: mol_type = other DNA
tggagttaacctttctttgtaa

SEQ ID NO: 45355 - DNA, 22 bp, synthetic construct
  misc_feature 1..22: note = chemically synthesized
  source 1..22: mol_type = other DNA
gagttaacctttctttgtaaag

SEQ ID NO: 45356 - DNA, 22 bp, synthetic construct
  misc_feature 1..22: note = chemically synthesized
  source 1..22: mol_type = other DNA
acctttctttgtaaagattaga

SEQ ID NO: 45357 - DNA, 22 bp, synthetic construct
  misc_feature 1..22: note = chemically synthesized
  source 1..22: mol_type = other DNA
tctttgtaaagattagacagca

SEQ ID NO: 45358 - DNA, 22 bp, synthetic construct
  misc_feature 1..22: note = chemically synthesized
  source 1..22: mol_type = other DNA
ctttgtaaagattagacagcag

SEQ ID NO: 45359 - DNA, 22 bp, synthetic construct
  misc_feature 1..22: note = chemically synthesized
  source 1..22: mol_type = other DNA
tttgtaaagattagacagcagg

SEQ ID NO: 45360 - DNA, 22 bp, synthetic construct
  misc_feature 1..22: note = chemically synthesized
  source 1..22: mol_type = other DNA
tgtaaagattagacagcaggca

SEQ ID NO: 45361 - DNA, 22 bp, synthetic construct
  misc_feature 1..22: note = chemically synthesized
  source 1..22: mol_type = other DNA
gtaaagattagacagcaggcag

SEQ ID NO: 45362 - DNA, 22 bp, synthetic construct
  misc_feature 1..22: note = chemically synthesized
  source 1..22: mol_type = other DNA
taaagattagacagcaggcagg

SEQ ID NO: 45363 - DNA, 22 bp, synthetic construct
  misc_feature 1..22: note = chemically synthesized
  source 1..22: mol_type = other DNA
gacagcaggcagggaagaatgc

SEQ ID NO: 45364 - DNA, 22 bp, synthetic construct
  misc_feature 1..22: note = chemically synthesized
  source 1..22: mol_type = other DNA
tgaaactgagagcaaagactgg

SEQ ID NO: 45365 - DNA, 22 bp, synthetic construct
  misc_feature 1..22: note = chemically synthesized
  source 1..22: mol_type = other DNA
gaaactgagagcaaagactggc

SEQ ID NO: 45366 - DNA, 22 bp, synthetic construct
  misc_feature 1..22: note = chemically synthesized
  source 1..22: mol_type = other DNA
aaactgagagcaaagactggca

SEQ ID NO: 45367 - DNA, 22 bp, synthetic construct
  misc_feature 1..22: note = chemically synthesized
  source 1..22: mol_type = other DNA
agagcaaagactggcatgcaat

SEQ ID NO: 45368 - DNA, 22 bp, synthetic construct
  misc_feature 1..22: note = chemically synthesized
  source 1..22: mol_type = other DNA
gcatgcaatttacattgatgtc

SEQ ID NO: 45369 - DNA, 22 bp, synthetic construct
  misc_feature 1..22: note = chemically synthesized
  source 1..22: mol_type = other DNA
acattgatgtcctggtgctgtg

SEQ ID NO: 45370 - DNA, 22 bp, synthetic construct
  misc_feature 1..22: note = chemically synthesized
  source 1..22: mol_type = other DNA
cattgatgtcctggtgctgtgc

SEQ ID NO: 45371 - DNA, 22 bp, synthetic construct
  misc_feature 1..22: note = chemically synthesized
  source 1..22: mol_type = other DNA
atgtcctggtgctgtgcataat

SEQ ID NO: 45372 - DNA, 22 bp, synthetic construct
  misc_feature 1..22: note = chemically synthesized
  source 1..22: mol_type = other DNA
gtgctgtgcataataagttgct

SEQ ID NO: 45373 - DNA, 22 bp, synthetic construct
  misc_feature 1..22: note = chemically synthesized
  source 1..22: mol_type = other DNA
tgcataataagttgcttaaaca

SEQ ID NO: 45374 - DNA, 22 bp, synthetic construct
  misc_feature 1..22: note = chemically synthesized
  source 1..22: mol_type = other DNA
cttaaacatgacagcaggatag

SEQ ID NO: 45375 - DNA, 22 bp, synthetic construct
  misc_feature 1..22: note = chemically synthesized
  source 1..22: mol_type = other DNA
aaacatgacagcaggataggat

SEQ ID NO: 45376 - DNA, 22 bp, synthetic construct
  misc_feature 1..22: note = chemically synthesized
  source 1..22: mol_type = other DNA
aacatgacagcaggataggatt

SEQ ID NO: 45377 - DNA, 22 bp, synthetic construct
  misc_feature 1..22: note = chemically synthesized
  source 1..22: mol_type = other DNA
tacataaaatttatttataaat

SEQ ID NO: 45378 - DNA, 22 bp, synthetic construct
  misc_feature 1..22: note = chemically synthesized
  source 1..22: mol_type = other DNA
acataaaatttatttataaatg

SEQ ID NO: 45379 - DNA, 22 bp, synthetic construct
  misc_feature 1..22: note = chemically synthesized
  source 1..22: mol_type = other DNA
cataaaatttatttataaatgg

SEQ ID NO: 45380 - DNA, 22 bp, synthetic construct
  misc_feature 1..22: note = chemically synthesized
  source 1..22: mol_type = other DNA
atttataaatggtaaagatgtt

SEQ ID NO: 45381 - DNA, 22 bp, synthetic construct
  misc_feature 1..22: note = chemically synthesized
  source 1..22: mol_type = other DNA
tttataaatggtaaagatgttt

SEQ ID NO: 45382 - DNA, 22 bp, synthetic construct
  misc_feature 1..22: note = chemically synthesized
  source 1..22: mol_type = other DNA
ataaatggtaaagatgtttcca

SEQ ID NO: 45383 - DNA, 22 bp, synthetic construct
  misc_feature 1..22: note = chemically synthesized
  source 1..22: mol_type = other DNA
taaatggtaaagatgtttccaa

SEQ ID NO: 45384 - DNA, 22 bp, synthetic construct
  misc_feature 1..22: note = chemically synthesized
  source 1..22: mol_type = other DNA
ccaacctctgctgaacttcctc

SEQ ID NO: 45385 - DNA, 22 bp, synthetic construct
  misc_feature 1..22: note = chemically synthesized
  source 1..22: mol_type = other DNA
caacctctgctgaacttcctca

SEQ ID NO: 45386 - DNA, 22 bp, synthetic construct
  misc_feature 1..22: note = chemically synthesized
  source 1..22: mol_type = other DNA
tgctgaacttcctcatagaatg

SEQ ID NO: 45387 - DNA, 22 bp, synthetic construct
  misc_feature 1..22: note = chemically synthesized
  source 1..22: mol_type = other DNA
ctgaacttcctcatagaatgtt

SEQ ID NO: 45388 - DNA, 22 bp, synthetic construct
  misc_feature 1..22: note = chemically synthesized
  source 1..22: mol_type = other DNA
aacttcctcatagaatgttcat

SEQ ID NO: 45389 - DNA, 22 bp, synthetic construct
  misc_feature 1..22: note = chemically synthesized
  source 1..22: mol_type = other DNA
cctcatagaatgttcatcagaa

SEQ ID NO: 45390 - DNA, 22 bp, synthetic construct
  misc_feature 1..22: note = chemically synthesized
  source 1..22: mol_type = other DNA
ctcatagaatgttcatcagaaa

SEQ ID NO: 45391 - DNA, 22 bp, synthetic construct
  misc_feature 1..22: note = chemically synthesized
  source 1..22: mol_type = other DNA
atagaatgttcatcagaaaaca

SEQ ID NO: 45392 - DNA, 22 bp, synthetic construct
  misc_feature 1..22: note = chemically synthesized
  source 1..22: mol_type = other DNA
atcagaaaacaaagtttctatc

SEQ ID NO: 45393 - DNA, 22 bp, synthetic construct
  misc_feature 1..22: note = chemically synthesized
  source 1..22: mol_type = other DNA
ctatctactctttcttccaaga

SEQ ID NO: 45394 - DNA, 22 bp, synthetic construct
  misc_feature 1..22: note = chemically synthesized
  source 1..22: mol_type = other DNA
tatctactctttcttccaagac

SEQ ID NO: 45395 - DNA, 22 bp, synthetic construct
  misc_feature 1..22: note = chemically synthesized
  source 1..22: mol_type = other DNA
tctactctttcttccaagactt

SEQ ID NO: 45396 - DNA, 22 bp, synthetic construct
  misc_feature 1..22: note = chemically synthesized
  source 1..22: mol_type = other DNA
ctctttcttccaagacttcaac

SEQ ID NO: 45397 - DNA, 22 bp, synthetic construct
  misc_feature 1..22: note = chemically synthesized
  source 1..22: mol_type = other DNA
tttcttccaagacttcaactcc

SEQ ID NO: 45398 - DNA, 22 bp, synthetic construct
  misc_feature 1..22: note = chemically synthesized
  source 1..22: mol_type = other DNA
tcttccaagacttcaactccta

SEQ ID NO: 45399 - DNA, 22 bp, synthetic construct
  misc_feature 1..22: note = chemically synthesized
  source 1..22: mol_type = other DNA
cttccaagacttcaactcctac

SEQ ID NO: 45400 - DNA, 22 bp, synthetic construct
  misc_feature 1..22: note = chemically synthesized
  source 1..22: mol_type = other DNA
ttccaagacttcaactcctacc

SEQ ID NO: 45401 - DNA, 22 bp, synthetic construct
  misc_feature 1..22: note = chemically synthesized
  source 1..22: mol_type = other DNA
ccaagacttcaactcctaccac

SEQ ID NO: 45402 - DNA, 22 bp, synthetic construct
  misc_feature 1..22: note = chemically synthesized
  source 1..22: mol_type = other DNA
caagacttcaactcctaccact

SEQ ID NO: 45403 - DNA, 22 bp, synthetic construct
  misc_feature 1..22: note = chemically synthesized
  source 1..22: mol_type = other DNA
caactcctaccactgacatcat

SEQ ID NO: 45404 - DNA, 22 bp, synthetic construct
  misc_feature 1..22: note = chemically synthesized
  source 1..22: mol_type = other DNA
aactcctaccactgacatcatg

SEQ ID NO: 45405 - DNA, 22 bp, synthetic construct
  misc_feature 1..22: note = chemically synthesized
  source 1..22: mol_type = other DNA
ctaccactgacatcatgaccct

SEQ ID NO: 45406 - DNA, 22 bp, synthetic construct
  misc_feature 1..22: note = chemically synthesized
  source 1..22: mol_type = other DNA
ccactgacatcatgaccctcag

SEQ ID NO: 45407 - DNA, 22 bp, synthetic construct
  misc_feature 1..22: note = chemically synthesized
  source 1..22: mol_type = other DNA
acatcatgaccctcagttctat

SEQ ID NO: 45408 - DNA, 22 bp, synthetic construct
  misc_feature 1..22: note = chemically synthesized
  source 1..22: mol_type = other DNA
agttctattcccctagccctgc

SEQ ID NO: 45409 - DNA, 22 bp, synthetic construct
  misc_feature 1..22: note = chemically synthesized
  source 1..22: mol_type = other DNA
tattcccctagccctgcccact

SEQ ID NO: 45410 - DNA, 22 bp, synthetic construct
  misc_feature 1..22: note = chemically synthesized
  source 1..22: mol_type = other DNA
ttcccctagccctgcccactcc

SEQ ID NO: 45411 - DNA, 22 bp, synthetic construct
  misc_feature 1..22: note = chemically synthesized
  source 1..22: mol_type = other DNA
ccctagccctgcccactcccct

SEQ ID NO: 45412 - DNA, 22 bp, synthetic construct
  misc_feature 1..22: note = chemically synthesized
  source 1..22: mol_type = other DNA
gccctgcccactcccctgaaat

SEQ ID NO: 45413 - DNA, 22 bp, synthetic construct
  misc_feature 1..22: note = chemically synthesized
  source 1..22: mol_type = other DNA
cccactcccctgaaatccagat

SEQ ID NO: 45414 - DNA, 22 bp, synthetic construct
  misc_feature 1..22: note = chemically synthesized
  source 1..22: mol_type = other DNA
ccctgaaatccagatccataaa

SEQ ID NO: 45415 - DNA, 22 bp, synthetic construct
  misc_feature 1..22: note = chemically synthesized
  source 1..22: mol_type = other DNA
aaatccagatccataaatccaa

SEQ ID NO: 45416 - DNA, 22 bp, synthetic construct
  misc_feature 1..22: note = chemically synthesized
  source 1..22: mol_type = other DNA
ggtatctcagtttggctgtccc

SEQ ID NO: 45417 - DNA, 22 bp, synthetic construct
  misc_feature 1..22: note = chemically synthesized
  source 1..22: mol_type = other DNA
agtttggctgtccctccatcaa

SEQ ID NO: 45418 - DNA, 22 bp, synthetic construct
  misc_feature 1..22: note = chemically synthesized
  source 1..22: mol_type = other DNA
ggctgtccctccatcaactcaa

SEQ ID NO: 45419 - DNA, 22 bp, synthetic construct
  misc_feature 1..22: note = chemically synthesized
  source 1..22: mol_type = other DNA
gctgtccctccatcaactcaaa

SEQ ID NO: 45420 - DNA, 22 bp, synthetic construct
  misc_feature 1..22: note = chemically synthesized
  source 1..22: mol_type = other DNA
tccctccatcaactcaaatttg

SEQ ID NO: 45421 - DNA, 22 bp, synthetic construct
  misc_feature 1..22: note = chemically synthesized
  source 1..22: mol_type = other DNA
catcaactcaaatttggctgac

SEQ ID NO: 45422 - DNA, 22 bp, synthetic construct
  misc_feature 1..22: note = chemically synthesized
  source 1..22: mol_type = other DNA
aaatttggctgacacagttttg

SEQ ID NO: 45423 - DNA, 22 bp, synthetic construct
  misc_feature 1..22: note = chemically synthesized
  source 1..22: mol_type = other DNA
ggctgacacagttttggattct

SEQ ID NO: 45424 - DNA, 22 bp, synthetic construct
  misc_feature 1..22: note = chemically synthesized
  source 1..22: mol_type = other DNA
gctgacacagttttggattcta

SEQ ID NO: 45425 - DNA, 22 bp, synthetic construct
  misc_feature 1..22: note = chemically synthesized
  source 1..22: mol_type = other DNA
acacagttttggattctagagc

SEQ ID NO: 45426 - DNA, 22 bp, synthetic construct
  misc_feature 1..22: note = chemically synthesized
  source 1..22: mol_type = other DNA
tggattctagagcatgcaggca

SEQ ID NO: 45427 - DNA, 22 bp, synthetic construct
  misc_feature 1..22: note = chemically synthesized
  source 1..22: mol_type = other DNA
ggattctagagcatgcaggcat

SEQ ID NO: 45428 - DNA, 22 bp, synthetic construct
  misc_feature 1..22: note = chemically synthesized
  source 1..22: mol_type = other DNA
gattctagagcatgcaggcatt

SEQ ID NO: 45429 - DNA, 22 bp, synthetic construct
  misc_feature 1..22: note = chemically synthesized
  source 1..22: mol_type = other DNA
tagagcatgcaggcattctgta

SEQ ID NO: 45430 - DNA, 22 bp, synthetic construct
  misc_feature 1..22: note = chemically synthesized
  source 1..22: mol_type = other DNA
gagcatgcaggcattctgtatg

SEQ ID NO: 45431 - DNA, 22 bp, synthetic construct
  misc_feature 1..22: note = chemically synthesized
  source 1..22: mol_type = other DNA
tgtatgtgctgtgcctttgcac

SEQ ID NO: 45432 - DNA, 22 bp, synthetic construct
  misc_feature 1..22: note = chemically synthesized
  source 1..22: mol_type = other DNA
tatgtgctgtgcctttgcactc

SEQ ID NO: 45433 - DNA, 22 bp, synthetic construct
  misc_feature 1..22: note = chemically synthesized
  source 1..22: mol_type = other DNA
tgcctttgcactcactcttccc

SEQ ID NO: 45434 - DNA, 22 bp, synthetic construct
  misc_feature 1..22: note = chemically synthesized
  source 1..22: mol_type = other DNA
tgcactcactcttccctccaga

SEQ ID NO: 45435 - DNA, 22 bp, synthetic construct
  misc_feature 1..22: note = chemically synthesized
  source 1..22: mol_type = other DNA
gcactcactcttccctccagac

SEQ ID NO: 45436 - DNA, 22 bp, synthetic construct
  misc_feature 1..22: note = chemically synthesized
  source 1..22: mol_type = other DNA
cactcactcttccctccagacc

SEQ ID NO: 45437 - DNA, 22 bp, synthetic construct
  misc_feature 1..22: note = chemically synthesized
  source 1..22: mol_type = other DNA
actcttccctccagaccccgtc

SEQ ID NO: 45438 - DNA, 22 bp, synthetic construct
  misc_feature 1..22: note = chemically synthesized
  source 1..22: mol_type = other DNA
ttccctccagaccccgtccttc

SEQ ID NO: 45439 - DNA, 22 bp, synthetic construct
  misc_feature 1..22: note = chemically synthesized
  source 1..22: mol_type = other DNA
ccctccagaccccgtccttcct

SEQ ID NO: 45440 - DNA, 22 bp, synthetic construct
  misc_feature 1..22: note = chemically synthesized
  source 1..22: mol_type = other DNA
cctccagaccccgtccttcctc

SEQ ID NO: 45441 - DNA, 22 bp, synthetic construct
  misc_feature 1..22: note = chemically synthesized
  source 1..22: mol_type = other DNA
cagaccccgtccttcctcactt

SEQ ID NO: 45442 - DNA, 22 bp, synthetic construct
  misc_feature 1..22: note = chemically synthesized
  source 1..22: mol_type = other DNA
cctcactttgccagttccaact

SEQ ID NO: 45443 - DNA, 22 bp, synthetic construct
  misc_feature 1..22: note = chemically synthesized
  source 1..22: mol_type = other DNA
ctcactttgccagttccaactt

SEQ ID NO: 45444 - DNA, 22 bp, synthetic construct
  misc_feature 1..22: note = chemically synthesized
  source 1..22: mol_type = other DNA
actttgccagttccaacttctc

SEQ ID NO: 45445 - DNA, 22 bp, synthetic construct
  misc_feature 1..22: note = chemically synthesized
  source 1..22: mol_type = other DNA
tgccagttccaacttctctctg

SEQ ID NO: 45446 - DNA, 22 bp, synthetic construct
  misc_feature 1..22: note = chemically synthesized
  source 1..22: mol_type = other DNA
gccagttccaacttctctctga

SEQ ID NO: 45447 - DNA, 22 bp, synthetic construct
  misc_feature 1..22: note = chemically synthesized
  source 1..22: mol_type = other DNA
ccagttccaacttctctctgaa

SEQ ID NO: 45448 - DNA, 22 bp, synthetic construct
  misc_feature 1..22: note = chemically synthesized
  source 1..22: mol_type = other DNA
caacttctctctgaagactcag

SEQ ID NO: 45449 - DNA, 22 bp, synthetic construct
  misc_feature 1..22: note = chemically synthesized
  source 1..22: mol_type = other DNA
ctctctgaagactcagtttagg

SEQ ID NO: 45450 - DNA, 22 bp, synthetic construct
  misc_feature 1..22: note = chemically synthesized
  source 1..22: mol_type = other DNA
tctctgaagactcagtttaggt

SEQ ID NO: 45451 - DNA, 22 bp, synthetic construct
  misc_feature 1..22: note = chemically synthesized
  source 1..22: mol_type = other DNA
tctgaagactcagtttaggtac

SEQ ID NO: 45452 - DNA, 22 bp, synthetic construct
  misc_feature 1..22: note = chemically synthesized
  source 1..22: mol_type = other DNA
tgaagactcagtttaggtacag

SEQ ID NO: 45453 - DNA, 22 bp, synthetic construct
  misc_feature 1..22: note = chemically synthesized
  source 1..22: mol_type = other DNA
aagactcagtttaggtacaggc

SEQ ID NO: 45454 - DNA, 22 bp, synthetic construct
  misc_feature 1..22: note = chemically synthesized
  source 1..22: mol_type = other DNA
agtttaggtacaggctccttta

SEQ ID NO: 45455 - DNA, 22 bp, synthetic construct
  misc_feature 1..22: note = chemically synthesized
  source 1..22: mol_type = other DNA
aggtacaggctcctttaggaaa

SEQ ID NO: 45456 - DNA, 22 bp, synthetic construct
  misc_feature 1..22: note = chemically synthesized
  source 1..22: mol_type = other DNA
ggtacaggctcctttaggaaat

SEQ ID NO: 45457 - DNA, 22 bp, synthetic construct
  misc_feature 1..22: note = chemically synthesized
  source 1..22: mol_type = other DNA
ctttaggaaatttttttttgac

SEQ ID NO: 45458 - DNA, 22 bp, synthetic construct
  misc_feature 1..22: note = chemically synthesized
  source 1..22: mol_type = other DNA
taggaaatttttttttgactct

SEQ ID NO: 45459 - DNA, 22 bp, synthetic construct
  misc_feature 1..22: note = chemically synthesized
  source 1..22: mol_type = other DNA
aggaaatttttttttgactcta

SEQ ID NO: 45460 - DNA, 22 bp, synthetic construct
  misc_feature 1..22: note = chemically synthesized
  source 1..22: mol_type = other DNA
ggaaatttttttttgactctac

SEQ ID NO: 45461 - DNA, 22 bp, synthetic construct
  misc_feature 1..22: note = chemically synthesized
  source 1..22: mol_type = other DNA
ttttttgactctacctagccca

SEQ ID NO: 45462 - DNA, 22 bp, synthetic construct
  misc_feature 1..22: note = chemically synthesized
  source 1..22: mol_type = other DNA
tttttgactctacctagcccag

SEQ ID NO: 45463 - DNA, 22 bp, synthetic construct
  misc_feature 1..22: note = chemically synthesized
  source 1..22: mol_type = other DNA
ttttgactctacctagcccaga

SEQ ID NO: 45464 - DNA, 22 bp, synthetic construct
  misc_feature 1..22: note = chemically synthesized
  source 1..22: mol_type = other DNA
tttgactctacctagcccagac

SEQ ID NO: 45465 - DNA, 22 bp, synthetic construct
  misc_feature 1..22: note = chemically synthesized
  source 1..22: mol_type = other DNA
ttgactctacctagcccagact

SEQ ID NO: 45466 - DNA, 22 bp, synthetic construct
  misc_feature 1..22: note = chemically synthesized
  source 1..22: mol_type = other DNA
tgactctacctagcccagactc

SEQ ID NO: 45467 - DNA, 22 bp, synthetic construct
  misc_feature 1..22: note = chemically synthesized
  source 1..22: mol_type = other DNA
gactctacctagcccagactca

SEQ ID NO: 45468 - DNA, 22 bp, synthetic construct
  misc_feature 1..22: note = chemically synthesized
  source 1..22: mol_type = other DNA
actctacctagcccagactcag

SEQ ID NO: 45469 - DNA, 22 bp, synthetic construct
  misc_feature 1..22: note = chemically synthesized
  source 1..22: mol_type = other DNA
tacctagcccagactcagttca

SEQ ID NO: 45470 - DNA, 22 bp, synthetic construct
  misc_feature 1..22: note = chemically synthesized
  source 1..22: mol_type = other DNA
cctagcccagactcagttcatc

SEQ ID NO: 45471 - DNA, 22 bp, synthetic construct
  misc_feature 1..22: note = chemically synthesized
  source 1..22: mol_type = other DNA
gcccagactcagttcatctacg

SEQ ID NO: 45472 - DNA, 22 bp, synthetic construct
  misc_feature 1..22: note = chemically synthesized
  source 1..22: mol_type = other DNA
agttcatctacgatattaatct

SEQ ID NO: 45473 - DNA, 22 bp, synthetic construct
  misc_feature 1..22: note = chemically synthesized
  source 1..22: mol_type = other DNA
atctacgatattaatctgcagt

SEQ ID NO: 45474 - DNA, 22 bp, synthetic construct
  misc_feature 1..22: note = chemically synthesized
  source 1..22: mol_type = other DNA
cgatattaatctgcagtgtcat

SEQ ID NO: 45475 - DNA, 22 bp, synthetic construct
  misc_feature 1..22: note = chemically synthesized
  source 1..22: mol_type = other DNA
atctgcagtgtcatgcactagc

SEQ ID NO: 45476 - DNA, 22 bp, synthetic construct
  misc_feature 1..22: note = chemically synthesized
  source 1..22: mol_type = other DNA
cagtgtcatgcactagcacaaa

SEQ ID NO: 45477 - DNA, 22 bp, synthetic construct
  misc_feature 1..22: note = chemically synthesized
  source 1..22: mol_type = other DNA
gcacaaaatatttgctgaatga

SEQ ID NO: 45478 - DNA, 22 bp, synthetic construct
  misc_feature 1..22: note = chemically synthesized
  source 1..22: mol_type = other DNA
gctgaatgaaagaatgagagtt

SEQ ID NO: 45479 - DNA, 22 bp, synthetic construct
  misc_feature 1..22: note = chemically synthesized
  source 1..22: mol_type = other DNA
ctgaatgaaagaatgagagtta

SEQ ID NO: 45480 - DNA, 22 bp, synthetic construct
  misc_feature 1..22: note = chemically synthesized
  source 1..22: mol_type = other DNA
aatgaaagaatgagagttaact

SEQ ID NO: 45481 - DNA, 22 bp, synthetic construct
  misc_feature 1..22: note = chemically synthesized
  source 1..22: mol_type = other DNA
acttttagtcaggcataaagat

SEQ ID NO: 45482 - DNA, 22 bp, synthetic construct
  misc_feature 1..22: note = chemically synthesized
  source 1..22: mol_type = other DNA
ttagtcaggcataaagataaaa

SEQ ID NO: 45483 - DNA, 22 bp, synthetic construct
  misc_feature 1..22: note = chemically synthesized
  source 1..22: mol_type = other DNA
tagtcaggcataaagataaaaa

SEQ ID NO: 45484 - DNA, 22 bp, synthetic construct
  misc_feature 1..22: note = chemically synthesized
  source 1..22: mol_type = other DNA
agtcaggcataaagataaaaaa

SEQ ID NO: 45485 - DNA, 22 bp, synthetic construct
  misc_feature 1..22: note = chemically synthesized
  source 1..22: mol_type = other DNA
gtcaggcataaagataaaaaac

SEQ ID NO: 45486 - DNA, 22 bp, synthetic construct
  misc_feature 1..22: note = chemically synthesized
  source 1..22: mol_type = other DNA
ttactccggtgtggagtgtttt

SEQ ID NO: 45487 - DNA, 22 bp, synthetic construct
  misc_feature 1..22: note = chemically synthesized
  source 1..22: mol_type = other DNA
tactccggtgtggagtgttttc

SEQ ID NO: 45488 - DNA, 22 bp, synthetic construct
  misc_feature 1..22: note = chemically synthesized
  source 1..22: mol_type = other DNA
actccggtgtggagtgttttca

SEQ ID NO: 45489 - DNA, 22 bp, synthetic construct
  misc_feature 1..22: note = chemically synthesized
  source 1..22: mol_type = other DNA
ctccggtgtggagtgttttcag

SEQ ID NO: 45490 - DNA, 22 bp, synthetic construct
  misc_feature 1..22: note = chemically synthesized
  source 1..22: mol_type = other DNA
cggtgtggagtgttttcaggat

SEQ ID NO: 45491 - DNA, 22 bp, synthetic construct
  misc_feature 1..22: note = chemically synthesized
  source 1..22: mol_type = other DNA
tcaggattcctaccaattagga

SEQ ID NO: 45492 - DNA, 22 bp, synthetic construct
  misc_feature 1..22: note = chemically synthesized
  source 1..22: mol_type = other DNA
caggattcctaccaattaggaa

SEQ ID NO: 45493 - DNA, 22 bp, synthetic construct
  misc_feature 1..22: note = chemically synthesized
  source 1..22: mol_type = other DNA
aggattcctaccaattaggaag

SEQ ID NO: 45494 - DNA, 22 bp, synthetic construct
  misc_feature 1..22: note = chemically synthesized
  source 1..22: mol_type = other DNA
ctaccaattaggaaggtgtttg

SEQ ID NO: 45495 - DNA, 22 bp, synthetic construct
  misc_feature 1..22: note = chemically synthesized
  source 1..22: mol_type = other DNA
ccaattaggaaggtgtttgatt

SEQ ID NO: 45496 - DNA, 22 bp, synthetic construct
  misc_feature 1..22: note = chemically synthesized
  source 1..22: mol_type = other DNA
ggaaggtgtttgattcttcaaa

SEQ ID NO: 45497 - DNA, 22 bp, synthetic construct
  misc_feature 1..22: note = chemically synthesized
  source 1..22: mol_type = other DNA
gattcttcaaactcagaaacac

SEQ ID NO: 45498 - DNA, 22 bp, synthetic construct
  misc_feature 1..22: note = chemically synthesized
  source 1..22: mol_type = other DNA
attcttcaaactcagaaacacc

SEQ ID NO: 45499 - DNA, 22 bp, synthetic construct
  misc_feature 1..22: note = chemically synthesized
  source 1..22: mol_type = other DNA
ttcaaactcagaaacacctccc

SEQ ID NO: 45500 - DNA, 22 bp, synthetic construct
  misc_feature 1..22: note = chemically synthesized
  source 1..22: mol_type = other DNA
caaactcagaaacacctcccct

SEQ ID NO: 45501 - DNA, 22 bp, synthetic construct
  misc_feature 1..22: note = chemically synthesized
  source 1..22: mol_type = other DNA
aaactcagaaacacctcccctt

SEQ ID NO: 45502 - DNA, 22 bp, synthetic construct
  misc_feature 1..22: note = chemically synthesized
  source 1..22: mol_type = other DNA
agaaacacctccccttaactga

SEQ ID NO: 45503 - DNA, 22 bp, synthetic construct
  misc_feature 1..22: note = chemically synthesized
  source 1..22: mol_type = other DNA
cccttaactgatggattcttca

SEQ ID NO: 45504 - DNA, 22 bp, synthetic construct
  misc_feature 1..22: note = chemically synthesized
  source 1..22: mol_type = other DNA
aactgatggattcttcaaactc

SEQ ID NO: 45505 - DNA, 22 bp, synthetic construct
  misc_feature 1..22: note = chemically synthesized
  source 1..22: mol_type = other DNA
actgatggattcttcaaactca

SEQ ID NO: 45506 - DNA, 22 bp, synthetic construct
  misc_feature 1..22: note = chemically synthesized
  source 1..22: mol_type = other DNA
atggattcttcaaactcagcat

SEQ ID NO: 45507 - DNA, 22 bp, synthetic construct
  misc_feature 1..22: note = chemically synthesized
  source 1..22: mol_type = other DNA
ttcaaactcagcatcagttaga

SEQ ID NO: 45508 - DNA, 22 bp, synthetic construct
  misc_feature 1..22: note = chemically synthesized
  source 1..22: mol_type = other DNA
caaactcagcatcagttagagg

SEQ ID NO: 45509 - DNA, 22 bp, synthetic construct
  misc_feature 1..22: note = chemically synthesized
  source 1..22: mol_type = other DNA
aaactcagcatcagttagaggg

SEQ ID NO: 45510 - DNA, 22 bp, synthetic construct
  misc_feature 1..22: note = chemically synthesized
  source 1..22: mol_type = other DNA
agcatcagttagagggcattag

SEQ ID NO: 45511 - DNA, 22 bp, synthetic construct
  misc_feature 1..22: note = chemically synthesized
  source 1..22: mol_type = other DNA
gagggcattagggcacttctca

SEQ ID NO: 45512 - DNA, 22 bp, synthetic construct
  misc_feature 1..22: note = chemically synthesized
  source 1..22: mol_type = other DNA
gggcacttctcaaaccctgcat

SEQ ID NO: 45513 - DNA, 22 bp, synthetic construct
  misc_feature 1..22: note = chemically synthesized
  source 1..22: mol_type = other DNA
ctcaaaccctgcattcagggaa

SEQ ID NO: 45514 - DNA, 22 bp, synthetic construct
  misc_feature 1..22: note = chemically synthesized
  source 1..22: mol_type = other DNA
tcaaaccctgcattcagggaag

SEQ ID NO: 45515 - DNA, 22 bp, synthetic construct
  misc_feature 1..22: note = chemically synthesized
  source 1..22: mol_type = other DNA
aaaccctgcattcagggaagat

SEQ ID NO: 45516 - DNA, 22 bp, synthetic construct
  misc_feature 1..22: note = chemically synthesized
  source 1..22: mol_type = other DNA
cattcagggaagatgtctgttg

SEQ ID NO: 45517 - DNA, 22 bp, synthetic construct
  misc_feature 1..22: note = chemically synthesized
  source 1..22: mol_type = other DNA
agggaagatgtctgttgtgggg

SEQ ID NO: 45518 - DNA, 22 bp, synthetic construct
  misc_feature 1..22: note = chemically synthesized
  source 1..22: mol_type = other DNA
ttgtggggtggtctggcctact

SEQ ID NO: 45519 - DNA, 22 bp, synthetic construct
  misc_feature 1..22: note = chemically synthesized
  source 1..22: mol_type = other DNA
tggggtggtctggcctacttgg

SEQ ID NO: 45520 - DNA, 22 bp, synthetic construct
  misc_feature 1..22: note = chemically synthesized
  source 1..22: mol_type = other DNA
gcctacttggcctgagccaagg

SEQ ID NO: 45521 - DNA, 22 bp, synthetic construct
  misc_feature 1..22: note = chemically synthesized
  source 1..22: mol_type = other DNA
cttggcctgagccaaggttctg

SEQ ID NO: 45522 - DNA, 22 bp, synthetic construct
  misc_feature 1..22: note = chemically synthesized
  source 1..22: mol_type = other DNA
ggcctgagccaaggttctgggc

SEQ ID NO: 45523 - DNA, 22 bp, synthetic construct
  misc_feature 1..22: note = chemically synthesized
  source 1..22: mol_type = other DNA
gcctgagccaaggttctgggca

SEQ ID NO: 45524 - DNA, 22 bp, synthetic construct
  misc_feature 1..22: note = chemically synthesized
  source 1..22: mol_type = other DNA
agccaaggttctgggcagttct

SEQ ID NO: 45525 - DNA, 22 bp, synthetic construct
  misc_feature 1..22: note = chemically synthesized
  source 1..22: mol_type = other DNA
tgggcagttctgttcagttaca

SEQ ID NO: 45526 - DNA, 22 bp, synthetic construct
  misc_feature 1..22: note = chemically synthesized
  source 1..22: mol_type = other DNA
ggcagttctgttcagttacaca

SEQ ID NO: 45527 - DNA, 22 bp, synthetic construct
  misc_feature 1..22: note = chemically synthesized
  source 1..22: mol_type = other DNA
tgttcagttacacatgcatgcg

SEQ ID NO: 45528 - DNA, 22 bp, synthetic construct
  misc_feature 1..22: note = chemically synthesized
  source 1..22: mol_type = other DNA
ttcagttacacatgcatgcgtt

SEQ ID NO: 45529 - DNA, 22 bp, synthetic construct
  misc_feature 1..22: note = chemically synthesized
  source 1..22: mol_type = other DNA
agttacacatgcatgcgttgag

SEQ ID NO: 45530 - DNA, 22 bp, synthetic construct
  misc_feature 1..22: note = chemically synthesized
  source 1..22: mol_type = other DNA
cacatgcatgcgttgagcattg

SEQ ID NO: 45531 - DNA, 22 bp, synthetic construct
  misc_feature 1..22: note = chemically synthesized
  source 1..22: mol_type = other DNA
agcattgattcaagcctggcct

SEQ ID NO: 45532 - DNA, 22 bp, synthetic construct
  misc_feature 1..22: note = chemically synthesized
  source 1..22: mol_type = other DNA
attcaagcctggcctgggcact

SEQ ID NO: 45533 - DNA, 22 bp, synthetic construct
  misc_feature 1..22: note = chemically synthesized
  source 1..22: mol_type = other DNA
aagcctggcctgggcactaggc

SEQ ID NO: 45534 - DNA, 22 bp, synthetic construct
  misc_feature 1..22: note = chemically synthesized
  source 1..22: mol_type = other DNA
gcctgggcactaggcatggttt

SEQ ID NO: 45535 - DNA, 22 bp, synthetic construct
  misc_feature 1..22: note = chemically synthesized
  source 1..22: mol_type = other DNA
ggcactaggcatggttttagat

SEQ ID NO: 45536 - DNA, 22 bp, synthetic construct
  misc_feature 1..22: note = chemically synthesized
  source 1..22: mol_type = other DNA
ggcatggttttagatattaggg

SEQ ID NO: 45537 - DNA, 22 bp, synthetic construct
  misc_feature 1..22: note = chemically synthesized
  source 1..22: mol_type = other DNA
tagatattagggacatattctg

SEQ ID NO: 45538 - DNA, 22 bp, synthetic construct
  misc_feature 1..22: note = chemically synthesized
  source 1..22: mol_type = other DNA
agatattagggacatattctgt

SEQ ID NO: 45539 - DNA, 22 bp, synthetic construct
  misc_feature 1..22: note = chemically synthesized
  source 1..22: mol_type = other DNA
gatattagggacatattctgtt

SEQ ID NO: 45540 - DNA, 22 bp, synthetic construct
  misc_feature 1..22: note = chemically synthesized
  source 1..22: mol_type = other DNA
gggacatattctgttttccttg

SEQ ID NO: 45541 - DNA, 22 bp, synthetic construct
  misc_feature 1..22: note = chemically synthesized
  source 1..22: mol_type = other DNA
tgttttccttgccttaagatac

SEQ ID NO: 45542 - DNA, 22 bp, synthetic construct
  misc_feature 1..22: note = chemically synthesized
  source 1..22: mol_type = other DNA
ttttccttgccttaagatacca

SEQ ID NO: 45543 - DNA, 22 bp, synthetic construct
  misc_feature 1..22: note = chemically synthesized
  source 1..22: mol_type = other DNA
tccttgccttaagataccagtc

SEQ ID NO: 45544 - DNA, 22 bp, synthetic construct
  misc_feature 1..22: note = chemically synthesized
  source 1..22: mol_type = other DNA
ccttgccttaagataccagtct

SEQ ID NO: 45545 - DNA, 22 bp, synthetic construct
  misc_feature 1..22: note = chemically synthesized
  source 1..22: mol_type = other DNA
cttgccttaagataccagtcta

SEQ ID NO: 45546 - DNA, 22 bp, synthetic construct
  misc_feature 1..22: note = chemically synthesized
  source 1..22: mol_type = other DNA
gccttaagataccagtctagta

SEQ ID NO: 45547 - DNA, 22 bp, synthetic construct
  misc_feature 1..22: note = chemically synthesized
  source 1..22: mol_type = other DNA
ccttaagataccagtctagtag

SEQ ID NO: 45548 - DNA, 22 bp, synthetic construct
  misc_feature 1..22: note = chemically synthesized
  source 1..22: mol_type = other DNA
aagataccagtctagtaggagc

SEQ ID NO: 45549 - DNA, 22 bp, synthetic construct
  misc_feature 1..22: note = chemically synthesized
  source 1..22: mol_type = other DNA
agataccagtctagtaggagcc

SEQ ID NO: 45550 - DNA, 22 bp, synthetic construct
  misc_feature 1..22: note = chemically synthesized
  source 1..22: mol_type = other DNA
gtaggagccactaaggcccctt

SEQ ID NO: 45551 - DNA, 22 bp, synthetic construct
  misc_feature 1..22: note = chemically synthesized
  source 1..22: mol_type = other DNA
aggcccctttttgagcctggac

SEQ ID NO: 45552 - DNA, 22 bp, synthetic construct
  misc_feature 1..22: note = chemically synthesized
  source 1..22: mol_type = other DNA
tttgagcctggacttcgcattc

SEQ ID NO: 45553 - DNA, 22 bp, synthetic construct
  misc_feature 1..22: note = chemically synthesized
  source 1..22: mol_type = other DNA
ttgagcctggacttcgcattca

SEQ ID NO: 45554 - DNA, 22 bp, synthetic construct
  misc_feature 1..22: note = chemically synthesized
  source 1..22: mol_type = other DNA
tgagcctggacttcgcattcaa

SEQ ID NO: 45555 - DNA, 22 bp, synthetic construct
  misc_feature 1..22: note = chemically synthesized
  source 1..22: mol_type = other DNA
gagcctggacttcgcattcaaa

SEQ ID NO: 45556 - DNA, 22 bp, synthetic construct
  misc_feature 1..22: note = chemically synthesized
  source 1..22: mol_type = other DNA
agcctggacttcgcattcaaac

SEQ ID NO: 45557 - DNA, 22 bp, synthetic construct
  misc_feature 1..22: note = chemically synthesized
  source 1..22: mol_type = other DNA
gacttcgcattcaaacataccc

SEQ ID NO: 45558 - DNA, 22 bp, synthetic construct
  misc_feature 1..22: note = chemically synthesized
  source 1..22: mol_type = other DNA
cgcattcaaacataccctgctt

SEQ ID NO: 45559 - DNA, 22 bp, synthetic construct
  misc_feature 1..22: note = chemically synthesized
  source 1..22: mol_type = other DNA
gcattcaaacataccctgcttc

SEQ ID NO: 45560 - DNA, 22 bp, synthetic construct
  misc_feature 1..22: note = chemically synthesized
  source 1..22: mol_type = other DNA
aaacataccctgcttctaatca

SEQ ID NO: 45561 - DNA, 22 bp, synthetic construct
  misc_feature 1..22: note = chemically synthesized
  source 1..22: mol_type = other DNA
cttctaatcaagtcatctattg

SEQ ID NO: 45562 - DNA, 22 bp, synthetic construct
  misc_feature 1..22: note = chemically synthesized
  source 1..22: mol_type = other DNA
ctaatcaagtcatctattggca

SEQ ID NO: 45563 - DNA, 22 bp, synthetic construct
  misc_feature 1..22: note = chemically synthesized
  source 1..22: mol_type = other DNA
taatcaagtcatctattggcag

SEQ ID NO: 45564 - DNA, 22 bp, synthetic construct
  misc_feature 1..22: note = chemically synthesized
  source 1..22: mol_type = other DNA
atcaagtcatctattggcagtg

SEQ ID NO: 45565 - DNA, 22 bp, synthetic construct
  misc_feature 1..22: note = chemically synthesized
  source 1..22: mol_type = other DNA
ttggcagtgaccttgggcaaat

SEQ ID NO: 45566 - DNA, 22 bp, synthetic construct
  misc_feature 1..22: note = chemically synthesized
  source 1..22: mol_type = other DNA
gcagtgaccttgggcaaatcat

SEQ ID NO: 45567 - DNA, 22 bp, synthetic construct
  misc_feature 1..22: note = chemically synthesized
  source 1..22: mol_type = other DNA
gggcaaatcatagtctctccaa

SEQ ID NO: 45568 - DNA, 22 bp, synthetic construct
  misc_feature 1..22: note = chemically synthesized
  source 1..22: mol_type = other DNA
ggcaaatcatagtctctccaag

SEQ ID NO: 45569 - DNA, 22 bp, synthetic construct
  misc_feature 1..22: note = chemically synthesized
  source 1..22: mol_type = other DNA
tccaagcattacttttctaatt

SEQ ID NO: 45570 - DNA, 22 bp, synthetic construct
  misc_feature 1..22: note = chemically synthesized
  source 1..22: mol_type = other DNA
caagcattacttttctaattga

SEQ ID NO: 45571 - DNA, 22 bp, synthetic construct
  misc_feature 1..22: note = chemically synthesized
  source 1..22: mol_type = other DNA
cttttctaattgaaacaagaac

SEQ ID NO: 45572 - DNA, 22 bp, synthetic construct
  misc_feature 1..22: note = chemically synthesized
  source 1..22: mol_type = other DNA
ttctaattgaaacaagaacctc

SEQ ID NO: 45573 - DNA, 22 bp, synthetic construct
  misc_feature 1..22: note = chemically synthesized
  source 1..22: mol_type = other DNA
tctaattgaaacaagaacctct

SEQ ID NO: 45574 - DNA, 22 bp, synthetic construct
  misc_feature 1..22: note = chemically synthesized
  source 1..22: mol_type = other DNA
ctaattgaaacaagaacctctc

SEQ ID NO: 45575 - DNA, 22 bp, synthetic construct
  misc_feature 1..22: note = chemically synthesized
  source 1..22: mol_type = other DNA
taattgaaacaagaacctctct

SEQ ID NO: 45576 - DNA, 22 bp, synthetic construct
  misc_feature 1..22: note = chemically synthesized
  source 1..22: mol_type = other DNA
attgaaacaagaacctctctct

SEQ ID NO: 45577 - DNA, 22 bp, synthetic construct
  misc_feature 1..22: note = chemically synthesized
  source 1..22: mol_type = other DNA
aaacaagaacctctctctatac

SEQ ID NO: 45578 - DNA, 22 bp, synthetic construct
  misc_feature 1..22: note = chemically synthesized
  source 1..22: mol_type = other DNA
tctctataccccagatttattt

SEQ ID NO: 45579 - DNA, 22 bp, synthetic construct
  misc_feature 1..22: note = chemically synthesized
  source 1..22: mol_type = other DNA
tctataccccagatttattttg

SEQ ID NO: 45580 - DNA, 22 bp, synthetic construct
  misc_feature 1..22: note = chemically synthesized
  source 1..22: mol_type = other DNA
tataccccagatttattttgag

SEQ ID NO: 45581 - DNA, 22 bp, synthetic construct
  misc_feature 1..22: note = chemically synthesized
  source 1..22: mol_type = other DNA
taccccagatttattttgagga

SEQ ID NO: 45582 - DNA, 22 bp, synthetic construct
  misc_feature 1..22: note = chemically synthesized
  source 1..22: mol_type = other DNA
attttgaggattatgagttaat

SEQ ID NO: 45583 - DNA, 22 bp, synthetic construct
  misc_feature 1..22: note = chemically synthesized
  source 1..22: mol_type = other DNA
ttttgaggattatgagttaatt

SEQ ID NO: 45584 - DNA, 22 bp, synthetic construct
  misc_feature 1..22: note = chemically synthesized
  source 1..22: mol_type = other DNA
tgaggattatgagttaattcat

SEQ ID NO: 45585 - DNA, 22 bp, synthetic construct
  misc_feature 1..22: note = chemically synthesized
  source 1..22: mol_type = other DNA
gaggattatgagttaattcata

SEQ ID NO: 45586 - DNA, 22 bp, synthetic construct
  misc_feature 1..22: note = chemically synthesized
  source 1..22: mol_type = other DNA
aggattatgagttaattcatag

SEQ ID NO: 45587 - DNA, 22 bp, synthetic construct
  misc_feature 1..22: note = chemically synthesized
  source 1..22: mol_type = other DNA
tgagttaattcatagctaaaat

SEQ ID NO: 45588 - DNA, 22 bp, synthetic construct
  misc_feature 1..22: note = chemically synthesized
  source 1..22: mol_type = other DNA
attcatagctaaaatgcttagc

SEQ ID NO: 45589 - DNA, 22 bp, synthetic construct
  misc_feature 1..22: note = chemically synthesized
  source 1..22: mol_type = other DNA
atagctaaaatgcttagcacct

SEQ ID NO: 45590 - DNA, 22 bp, synthetic construct
  misc_feature 1..22: note = chemically synthesized
  source 1..22: mol_type = other DNA
aaatgcttagcacctaacagca

SEQ ID NO: 45591 - DNA, 22 bp, synthetic construct
  misc_feature 1..22: note = chemically synthesized
  source 1..22: mol_type = other DNA
agcacctaacagcacataaccc

SEQ ID NO: 45592 - DNA, 22 bp, synthetic construct
  misc_feature 1..22: note = chemically synthesized
  source 1..22: mol_type = other DNA
gcacctaacagcacataaccca

SEQ ID NO: 45593 - DNA, 22 bp, synthetic construct
  misc_feature 1..22: note = chemically synthesized
  source 1..22: mol_type = other DNA
acagcacataacccacacatac

SEQ ID NO: 45594 - DNA, 22 bp, synthetic construct
  misc_feature 1..22: note = chemically synthesized
  source 1..22: mol_type = other DNA
ttcaattgcgtattactaaaaa

SEQ ID NO: 45595 - DNA, 22 bp, synthetic construct
  misc_feature 1..22: note = chemically synthesized
  source 1..22: mol_type = other DNA
tcaattgcgtattactaaaaag

SEQ ID NO: 45596 - DNA, 22 bp, synthetic construct
  misc_feature 1..22: note = chemically synthesized
  source 1..22: mol_type = other DNA
caattgcgtattactaaaaaga

SEQ ID NO: 45597 - DNA, 22 bp, synthetic construct
  misc_feature 1..22: note = chemically synthesized
  source 1..22: mol_type = other DNA
aattgcgtattactaaaaagaa

SEQ ID NO: 45598 - DNA, 22 bp, synthetic construct
  misc_feature 1..22: note = chemically synthesized
  source 1..22: mol_type = other DNA
cgtattactaaaaagaaggaat

SEQ ID NO: 45599 - DNA, 22 bp, synthetic construct
  misc_feature 1..22: note = chemically synthesized
  source 1..22: mol_type = other DNA
ctaaaaagaaggaatgatttcc

SEQ ID NO: 45600 - DNA, 22 bp, synthetic construct
  misc_feature 1..22: note = chemically synthesized
  source 1..22: mol_type = other DNA
aaaagaaggaatgatttcctag

SEQ ID NO: 45601 - DNA, 22 bp, synthetic construct
  misc_feature 1..22: note = chemically synthesized
  source 1..22: mol_type = other DNA
cctagaggaggtgcttcttctg

SEQ ID NO: 45602 - DNA, 22 bp, synthetic construct
  misc_feature 1..22: note = chemically synthesized
  source 1..22: mol_type = other DNA
ctagaggaggtgcttcttctgg

SEQ ID NO: 45603 - DNA, 22 bp, synthetic construct
  misc_feature 1..22: note = chemically synthesized
  source 1..22: mol_type = other DNA
gaggaggtgcttcttctggcca

SEQ ID NO: 45604 - DNA, 22 bp, synthetic construct
  misc_feature 1..22: note = chemically synthesized
  source 1..22: mol_type = other DNA
cttctggccaagggctgattca

SEQ ID NO: 45605 - DNA, 22 bp, synthetic construct
  misc_feature 1..22: note = chemically synthesized
  source 1..22: mol_type = other DNA
ttctggccaagggctgattcag

SEQ ID NO: 45606 - DNA, 22 bp, synthetic construct
  misc_feature 1..22: note = chemically synthesized
  source 1..22: mol_type = other DNA
ctggccaagggctgattcagag

SEQ ID NO: 45607 - DNA, 22 bp, synthetic construct
  misc_feature 1..22: note = chemically synthesized
  source 1..22: mol_type = other DNA
tggccaagggctgattcagagc

SEQ ID NO: 45608 - DNA, 22 bp, synthetic construct
  misc_feature 1..22: note = chemically synthesized
  source 1..22: mol_type = other DNA
gccaagggctgattcagagcct

SEQ ID NO: 45609 - DNA, 22 bp, synthetic construct
  misc_feature 1..22: note = chemically synthesized
  source 1..22: mol_type = other DNA
attcagagccttaattaactaa

SEQ ID NO: 45610 - DNA, 22 bp, synthetic construct
  misc_feature 1..22: note = chemically synthesized
  source 1..22: mol_type = other DNA
agagccttaattaactaaatag

SEQ ID NO: 45611 - DNA, 22 bp, synthetic construct
  misc_feature 1..22: note = chemically synthesized
  source 1..22: mol_type = other DNA
aattaactaaatagatcaagca

SEQ ID NO: 45612 - DNA, 22 bp, synthetic construct
  misc_feature 1..22: note = chemically synthesized
  source 1..22: mol_type = other DNA
attaactaaatagatcaagcat

SEQ ID NO: 45613 - DNA, 22 bp, synthetic construct
  misc_feature 1..22: note = chemically synthesized
  source 1..22: mol_type = other DNA
actaaatagatcaagcatatct

SEQ ID NO: 45614 - DNA, 22 bp, synthetic construct
  misc_feature 1..22: note = chemically synthesized
  source 1..22: mol_type = other DNA
aatagatcaagcatatctaact

SEQ ID NO: 45615 - DNA, 22 bp, synthetic construct
  misc_feature 1..22: note = chemically synthesized
  source 1..22: mol_type = other DNA
actggtcaccggaagtggtcca

SEQ ID NO: 45616 - DNA, 22 bp, synthetic construct
  misc_feature 1..22: note = chemically synthesized
  source 1..22: mol_type = other DNA
gtcaccggaagtggtccatgag

SEQ ID NO: 45617 - DNA, 22 bp, synthetic construct
  misc_feature 1..22: note = chemically synthesized
  source 1..22: mol_type = other DNA
cagcaatgggaaggtgtcagag

SEQ ID NO: 45618 - DNA, 22 bp, synthetic construct
  misc_feature 1..22: note = chemically synthesized
  source 1..22: mol_type = other DNA
ggaaaaagacatagagagaaac

SEQ ID NO: 45619 - DNA, 22 bp, synthetic construct
  misc_feature 1..22: note = chemically synthesized
  source 1..22: mol_type = other DNA
ttaggatgtctacagatttcca

SEQ ID NO: 45620 - DNA, 22 bp, synthetic construct
  misc_feature 1..22: note = chemically synthesized
  source 1..22: mol_type = other DNA
aggatgtctacagatttccaag

SEQ ID NO: 45621 - DNA, 22 bp, synthetic construct
  misc_feature 1..22: note = chemically synthesized
  source 1..22: mol_type = other DNA
ggatgtctacagatttccaaga

SEQ ID NO: 45622 - DNA, 22 bp, synthetic construct
  misc_feature 1..22: note = chemically synthesized
  source 1..22: mol_type = other DNA
cagatttccaagacaataattg

SEQ ID NO: 45623 - DNA, 22 bp, synthetic construct
  misc_feature 1..22: note = chemically synthesized
  source 1..22: mol_type = other DNA
ccaagacaataattgaaatgaa

SEQ ID NO: 45624 - DNA, 22 bp, synthetic construct
  misc_feature 1..22: note = chemically synthesized
  source 1..22: mol_type = other DNA
caagacaataattgaaatgaac

SEQ ID NO: 45625 - DNA, 22 bp, synthetic construct
  misc_feature 1..22: note = chemically synthesized
  source 1..22: mol_type = other DNA
aaatgaacaaaggcaagggatg

SEQ ID NO: 45626 - DNA, 22 bp, synthetic construct
  misc_feature 1..22: note = chemically synthesized
  source 1..22: mol_type = other DNA
catttctttcctttatcacctt

SEQ ID NO: 45627 - DNA, 22 bp, synthetic construct
  misc_feature 1..22: note = chemically synthesized
  source 1..22: mol_type = other DNA
atttctttcctttatcaccttt

SEQ ID NO: 45628 - DNA, 22 bp, synthetic construct
  misc_feature 1..22: note = chemically synthesized
  source 1..22: mol_type = other DNA
ctttcctttatcacctttccct

SEQ ID NO: 45629 - DNA, 22 bp, synthetic construct
  misc_feature 1..22: note = chemically synthesized
  source 1..22: mol_type = other DNA
tttcctttatcacctttccctt

SEQ ID NO: 45630 - DNA, 22 bp, synthetic construct
  misc_feature 1..22: note = chemically synthesized
  source 1..22: mol_type = other DNA
tcctttatcacctttcccttgt

SEQ ID NO: 45631 - DNA, 22 bp, synthetic construct
  misc_feature 1..22: note = chemically synthesized
  source 1..22: mol_type = other DNA
cctttatcacctttcccttgtt

SEQ ID NO: 45632 - DNA, 22 bp, synthetic construct
  misc_feature 1..22: note = chemically synthesized
  source 1..22: mol_type = other DNA
ctttatcacctttcccttgttc

SEQ ID NO: 45633 - DNA, 22 bp, synthetic construct
  misc_feature 1..22: note = chemically synthesized
  source 1..22: mol_type = other DNA
tatcacctttcccttgttcttc

SEQ ID NO: 45634 - DNA, 22 bp, synthetic construct
  misc_feature 1..22: note = chemically synthesized
  source 1..22: mol_type = other DNA
atcacctttcccttgttcttca

SEQ ID NO: 45635 - DNA, 22 bp, synthetic construct
  misc_feature 1..22: note = chemically synthesized
  source 1..22: mol_type = other DNA
tcacctttcccttgttcttcag

SEQ ID NO: 45636 - DNA, 22 bp, synthetic construct
  misc_feature 1..22: note = chemically synthesized
  source 1..22: mol_type = other DNA
tcccttgttcttcagctccagc

SEQ ID NO: 45637 - DNA, 22 bp, synthetic construct
  misc_feature 1..22: note = chemically synthesized
  source 1..22: mol_type = other DNA
cccttgttcttcagctccagct

SEQ ID NO: 45638 - DNA, 22 bp, synthetic construct
  misc_feature 1..22: note = chemically synthesized
  source 1..22: mol_type = other DNA
ccttgttcttcagctccagctg

SEQ ID NO: 45639 - DNA, 22 bp, synthetic construct
  misc_feature 1..22: note = chemically synthesized
  source 1..22: mol_type = other DNA
gttcttcagctccagctgtgcc

SEQ ID NO: 45640 - DNA, 22 bp, synthetic construct
  misc_feature 1..22: note = chemically synthesized
  source 1..22: mol_type = other DNA
ttcttcagctccagctgtgccc

SEQ ID NO: 45641 - DNA, 22 bp, synthetic construct
  misc_feature 1..22: note = chemically synthesized
  source 1..22: mol_type = other DNA
ttcagctccagctgtgcccaca

SEQ ID NO: 45642 - DNA, 22 bp, synthetic construct
  misc_feature 1..22: note = chemically synthesized
  source 1..22: mol_type = other DNA
cagctccagctgtgcccacaga

SEQ ID NO: 45643 - DNA, 22 bp, synthetic construct
  misc_feature 1..22: note = chemically synthesized
  source 1..22: mol_type = other DNA
agctccagctgtgcccacagac

SEQ ID NO: 45644 - DNA, 22 bp, synthetic construct
  misc_feature 1..22: note = chemically synthesized
  source 1..22: mol_type = other DNA
cagctgtgcccacagacaccac

SEQ ID NO: 45645 - DNA, 22 bp, synthetic construct
  misc_feature 1..22: note = chemically synthesized
  source 1..22: mol_type = other DNA
tgcccacagacaccacagggaa

SEQ ID NO: 45646 - DNA, 22 bp, synthetic construct
  misc_feature 1..22: note = chemically synthesized
  source 1..22: mol_type = other DNA
tgaacacaggggtttgaaccag

SEQ ID NO: 45647 - DNA, 22 bp, synthetic construct
  misc_feature 1..22: note = chemically synthesized
  source 1..22: mol_type = other DNA
aacacaggggtttgaaccaggg

SEQ ID NO: 45648 - DNA, 22 bp, synthetic construct
  misc_feature 1..22: note = chemically synthesized
  source 1..22: mol_type = other DNA
gaaccagggcctctctaagtct

SEQ ID NO: 45649 - DNA, 22 bp, synthetic construct
  misc_feature 1..22: note = chemically synthesized
  source 1..22: mol_type = other DNA
aaccagggcctctctaagtctt

SEQ ID NO: 45650 - DNA, 22 bp, synthetic construct
  misc_feature 1..22: note = chemically synthesized
  source 1..22: mol_type = other DNA
tctaagtcttttccaactctga

SEQ ID NO: 45651 - DNA, 22 bp, synthetic construct
  misc_feature 1..22: note = chemically synthesized
  source 1..22: mol_type = other DNA
taagtcttttccaactctgata

SEQ ID NO: 45652 - DNA, 22 bp, synthetic construct
  misc_feature 1..22: note = chemically synthesized
  source 1..22: mol_type = other DNA
agtcttttccaactctgatacc

SEQ ID NO: 45653 - DNA, 22 bp, synthetic construct
  misc_feature 1..22: note = chemically synthesized
  source 1..22: mol_type = other DNA
ttccaactctgataccctgaag

SEQ ID NO: 45654 - DNA, 22 bp, synthetic construct
  misc_feature 1..22: note = chemically synthesized
  source 1..22: mol_type = other DNA
tccaactctgataccctgaagt

SEQ ID NO: 45655 - DNA, 22 bp, synthetic construct
  misc_feature 1..22: note = chemically synthesized
  source 1..22: mol_type = other DNA
ccaactctgataccctgaagtt

SEQ ID NO: 45656 - DNA, 22 bp, synthetic construct
  misc_feature 1..22: note = chemically synthesized
  source 1..22: mol_type = other DNA
caactctgataccctgaagttc

SEQ ID NO: 45657 - DNA, 22 bp, synthetic construct
  misc_feature 1..22: note = chemically synthesized
  source 1..22: mol_type = other DNA
tgataccctgaagttctcagaa

SEQ ID NO: 45658 - DNA, 22 bp, synthetic construct
  misc_feature 1..22: note = chemically synthesized
  source 1..22: mol_type = other DNA
ataccctgaagttctcagaaac

SEQ ID NO: 45659 - DNA, 22 bp, synthetic construct
  misc_feature 1..22: note = chemically synthesized
  source 1..22: mol_type = other DNA
aagttctcagaaacttccataa

SEQ ID NO: 45660 - DNA, 22 bp, synthetic construct
  misc_feature 1..22: note = chemically synthesized
  source 1..22: mol_type = other DNA
tcagaaacttccataaattttg

SEQ ID NO: 45661 - DNA, 22 bp, synthetic construct
  misc_feature 1..22: note = chemically synthesized
  source 1..22: mol_type = other DNA
agaaacttccataaattttggc

SEQ ID NO: 45662 - DNA, 22 bp, synthetic construct
  misc_feature 1..22: note = chemically synthesized
  source 1..22: mol_type = other DNA
ccataaattttggctgaagaag

SEQ ID NO: 45663 - DNA, 22 bp, synthetic construct
  misc_feature 1..22: note = chemically synthesized
  source 1..22: mol_type = other DNA
cataaattttggctgaagaagc

SEQ ID NO: 45664 - DNA, 22 bp, synthetic construct
  misc_feature 1..22: note = chemically synthesized
  source 1..22: mol_type = other DNA
tggctgaagaagccatagcaaa

SEQ ID NO: 45665 - DNA, 22 bp, synthetic construct
  misc_feature 1..22: note = chemically synthesized
  source 1..22: mol_type = other DNA
ggctgaagaagccatagcaaac

SEQ ID NO: 45666 - DNA, 22 bp, synthetic construct
  misc_feature 1..22: note = chemically synthesized
  source 1..22: mol_type = other DNA
gctgaagaagccatagcaaact

SEQ ID NO: 45667 - DNA, 22 bp, synthetic construct
  misc_feature 1..22: note = chemically synthesized
  source 1..22: mol_type = other DNA
aagaagccatagcaaacttgtc

SEQ ID NO: 45668 - DNA, 22 bp, synthetic construct
  misc_feature 1..22: note = chemically synthesized
  source 1..22: mol_type = other DNA
gtcagatggtttcttaccttta

SEQ ID NO: 45669 - DNA, 22 bp, synthetic construct
  misc_feature 1..22: note = chemically synthesized
  source 1..22: mol_type = other DNA
tcagatggtttcttacctttaa

SEQ ID NO: 45670 - DNA, 22 bp, synthetic construct
  misc_feature 1..22: note = chemically synthesized
  source 1..22: mol_type = other DNA
cttacctttaactcagccattt

SEQ ID NO: 45671 - DNA, 22 bp, synthetic construct
  misc_feature 1..22: note = chemically synthesized
  source 1..22: mol_type = other DNA
ttacctttaactcagccatttt

SEQ ID NO: 45672 - DNA, 22 bp, synthetic construct
  misc_feature 1..22: note = chemically synthesized
  source 1..22: mol_type = other DNA
acctttaactcagccattttct

SEQ ID NO: 45673 - DNA, 22 bp, synthetic construct
  misc_feature 1..22: note = chemically synthesized
  source 1..22: mol_type = other DNA
cctttaactcagccattttctc

SEQ ID NO: 45674 - DNA, 22 bp, synthetic construct
  misc_feature 1..22: note = chemically synthesized
  source 1..22: mol_type = other DNA
taactcagccattttctctctc

SEQ ID NO: 45675 - DNA, 22 bp, synthetic construct
  misc_feature 1..22: note = chemically synthesized
  source 1..22: mol_type = other DNA
aactcagccattttctctctcc

SEQ ID NO: 45676 - DNA, 22 bp, synthetic construct
  misc_feature 1..22: note = chemically synthesized
  source 1..22: mol_type = other DNA
actcagccattttctctctcct

SEQ ID NO: 45677 - DNA, 22 bp, synthetic construct
  misc_feature 1..22: note = chemically synthesized
  source 1..22: mol_type = other DNA
agccattttctctctcctctat

SEQ ID NO: 45678 - DNA, 22 bp, synthetic construct
  misc_feature 1..22: note = chemically synthesized
  source 1..22: mol_type = other DNA
tctctctcctctatgtgtggtg

SEQ ID NO: 45679 - DNA, 22 bp, synthetic construct
  misc_feature 1..22: note = chemically synthesized
  source 1..22: mol_type = other DNA
ctctctcctctatgtgtggtga

SEQ ID NO: 45680 - DNA, 22 bp, synthetic construct
  misc_feature 1..22: note = chemically synthesized
  source 1..22: mol_type = other DNA
tctctcctctatgtgtggtgac

SEQ ID NO: 45681 - DNA, 22 bp, synthetic construct
  misc_feature 1..22: note = chemically synthesized
  source 1..22: mol_type = other DNA
tctcctctatgtgtggtgactt

SEQ ID NO: 45682 - DNA, 22 bp, synthetic construct
  misc_feature 1..22: note = chemically synthesized
  source 1..22: mol_type = other DNA
tcctctatgtgtggtgacttca

SEQ ID NO: 45683 - DNA, 22 bp, synthetic construct
  misc_feature 1..22: note = chemically synthesized
  source 1..22: mol_type = other DNA
ctctatgtgtggtgacttcagg

SEQ ID NO: 45684 - DNA, 22 bp, synthetic construct
  misc_feature 1..22: note = chemically synthesized
  source 1..22: mol_type = other DNA
tatgtgtggtgacttcaggaaa

SEQ ID NO: 45685 - DNA, 22 bp, synthetic construct
  misc_feature 1..22: note = chemically synthesized
  source 1..22: mol_type = other DNA
tgtgtggtgacttcaggaaacc

SEQ ID NO: 45686 - DNA, 22 bp, synthetic construct
  misc_feature 1..22: note = chemically synthesized
  source 1..22: mol_type = other DNA
caggaaacccaggcccagagga

SEQ ID NO: 45687 - DNA, 22 bp, synthetic construct
  misc_feature 1..22: note = chemically synthesized
  source 1..22: mol_type = other DNA
aggaaacccaggcccagaggat

SEQ ID NO: 45688 - DNA, 22 bp, synthetic construct
  misc_feature 1..22: note = chemically synthesized
  source 1..22: mol_type = other DNA
ctttctccttcaaaccactctt

SEQ ID NO: 45689 - DNA, 22 bp, synthetic construct
  misc_feature 1..22: note = chemically synthesized
  source 1..22: mol_type = other DNA
tttctccttcaaaccactcttt

SEQ ID NO: 45690 - DNA, 22 bp, synthetic construct
  misc_feature 1..22: note = chemically synthesized
  source 1..22: mol_type = other DNA
tctccttcaaaccactctttgg

SEQ ID NO: 45691 - DNA, 22 bp, synthetic construct
  misc_feature 1..22: note = chemically synthesized
  source 1..22: mol_type = other DNA
ctccttcaaaccactctttgga

SEQ ID NO: 45692 - DNA, 22 bp, synthetic construct
  misc_feature 1..22: note = chemically synthesized
  source 1..22: mol_type = other DNA
tccttcaaaccactctttggat

SEQ ID NO: 45693 - DNA, 22 bp, synthetic construct
  misc_feature 1..22: note = chemically synthesized
  source 1..22: mol_type = other DNA
cttcaaaccactctttggatat

SEQ ID NO: 45694 - DNA, 22 bp, synthetic construct
  misc_feature 1..22: note = chemically synthesized
  source 1..22: mol_type = other DNA
caaaccactctttggatattcc

SEQ ID NO: 45695 - DNA, 22 bp, synthetic construct
  misc_feature 1..22: note = chemically synthesized
  source 1..22: mol_type = other DNA
aaaccactctttggatattccg

SEQ ID NO: 45696 - DNA, 22 bp, synthetic construct
  misc_feature 1..22: note = chemically synthesized
  source 1..22: mol_type = other DNA
tttggatattccggttcccact

SEQ ID NO: 45697 - DNA, 22 bp, synthetic construct
  misc_feature 1..22: note = chemically synthesized
  source 1..22: mol_type = other DNA
tggatattccggttcccactgc

SEQ ID NO: 45698 - DNA, 22 bp, synthetic construct
  misc_feature 1..22: note = chemically synthesized
  source 1..22: mol_type = other DNA
ggatattccggttcccactgct

SEQ ID NO: 45699 - DNA, 22 bp, synthetic construct
  misc_feature 1..22: note = chemically synthesized
  source 1..22: mol_type = other DNA
gatattccggttcccactgctt

SEQ ID NO: 45700 - DNA, 22 bp, synthetic construct
  misc_feature 1..22: note = chemically synthesized
  source 1..22: mol_type = other DNA
cggttcccactgcttcactgcg

SEQ ID NO: 45701 - DNA, 22 bp, synthetic construct
  misc_feature 1..22: note = chemically synthesized
  source 1..22: mol_type = other DNA
ccactgcttcactgcgcttcac

SEQ ID NO: 45702 - DNA, 22 bp, synthetic construct
  misc_feature 1..22: note = chemically synthesized
  source 1..22: mol_type = other DNA
cttcactgcgcttcactggtca

SEQ ID NO: 45703 - DNA, 22 bp, synthetic construct
  misc_feature 1..22: note = chemically synthesized
  source 1..22: mol_type = other DNA
cactgcgcttcactggtcagtg

SEQ ID NO: 45704 - DNA, 22 bp, synthetic construct
  misc_feature 1..22: note = chemically synthesized
  source 1..22: mol_type = other DNA
actgcgcttcactggtcagtgc

SEQ ID NO: 45705 - DNA, 22 bp, synthetic construct
  misc_feature 1..22: note = chemically synthesized
  source 1..22: mol_type = other DNA
cgcttcactggtcagtgcgtca

SEQ ID NO: 45706 - DNA, 22 bp, synthetic construct
  misc_feature 1..22: note = chemically synthesized
  source 1..22: mol_type = other DNA
cactggtcagtgcgtcactcaa

SEQ ID NO: 45707 - DNA, 22 bp, synthetic construct
  misc_feature 1..22: note = chemically synthesized
  source 1..22: mol_type = other DNA
actggtcagtgcgtcactcaaa

SEQ ID NO: 45708 - DNA, 22 bp, synthetic construct
  misc_feature 1..22: note = chemically synthesized
  source 1..22: mol_type = other DNA
gtcagtgcgtcactcaaactag

SEQ ID NO: 45709 - DNA, 22 bp, synthetic construct
  misc_feature 1..22: note = chemically synthesized
  source 1..22: mol_type = other DNA
aaactagctgaaagaattgtct

SEQ ID NO: 45710 - DNA, 22 bp, synthetic construct
  misc_feature 1..22: note = chemically synthesized
  source 1..22: mol_type = other DNA
gctgaaagaattgtctaactca

SEQ ID NO: 45711 - DNA, 22 bp, synthetic construct
  misc_feature 1..22: note = chemically synthesized
  source 1..22: mol_type = other DNA
aaagaattgtctaactcataca

SEQ ID NO: 45712 - DNA, 22 bp, synthetic construct
  misc_feature 1..22: note = chemically synthesized
  source 1..22: mol_type = other DNA
tctaactcatacacagggacaa

SEQ ID NO: 45713 - DNA, 22 bp, synthetic construct
  misc_feature 1..22: note = chemically synthesized
  source 1..22: mol_type = other DNA
actcatacacagggacaaagtc

SEQ ID NO: 45714 - DNA, 22 bp, synthetic construct
  misc_feature 1..22: note = chemically synthesized
  source 1..22: mol_type = other DNA
atacacagggacaaagtccagc

SEQ ID NO: 45715 - DNA, 22 bp, synthetic construct
  misc_feature 1..22: note = chemically synthesized
  source 1..22: mol_type = other DNA
atttaaccggttacacaattgc

SEQ ID NO: 45716 - DNA, 22 bp, synthetic construct
  misc_feature 1..22: note = chemically synthesized
  source 1..22: mol_type = other DNA
tttaaccggttacacaattgcc

SEQ ID NO: 45717 - DNA, 22 bp, synthetic construct
  misc_feature 1..22: note = chemically synthesized
  source 1..22: mol_type = other DNA
aaccggttacacaattgccttt

SEQ ID NO: 45718 - DNA, 22 bp, synthetic construct
  misc_feature 1..22: note = chemically synthesized
  source 1..22: mol_type = other DNA
accggttacacaattgcctttg

SEQ ID NO: 45719 - DNA, 22 bp, synthetic construct
  misc_feature 1..22: note = chemically synthesized
  source 1..22: mol_type = other DNA
cacaattgcctttggtttttac

SEQ ID NO: 45720 - DNA, 22 bp, synthetic construct
  misc_feature 1..22: note = chemically synthesized
  source 1..22: mol_type = other DNA
cctttggtttttacagtttgtt

SEQ ID NO: 45721 - DNA, 22 bp, synthetic construct
  misc_feature 1..22: note = chemically synthesized
  source 1..22: mol_type = other DNA
tggtttttacagtttgttccta

SEQ ID NO: 45722 - DNA, 22 bp, synthetic construct
  misc_feature 1..22: note = chemically synthesized
  source 1..22: mol_type = other DNA
ggtttttacagtttgttcctaa

SEQ ID NO: 45723 - DNA, 22 bp, synthetic construct
  misc_feature 1..22: note = chemically synthesized
  source 1..22: mol_type = other DNA
gtttttacagtttgttcctaag

SEQ ID NO: 45724 - DNA, 22 bp, synthetic construct
  misc_feature 1..22: note = chemically synthesized
  source 1..22: mol_type = other DNA
ttacagtttgttcctaagtgtt

SEQ ID NO: 45725 - DNA, 22 bp, synthetic construct
  misc_feature 1..22: note = chemically synthesized
  source 1..22: mol_type = other DNA
tacagtttgttcctaagtgttt

SEQ ID NO: 45726 - DNA, 22 bp, synthetic construct
  misc_feature 1..22: note = chemically synthesized
  source 1..22: mol_type = other DNA
acagtttgttcctaagtgtttc

SEQ ID NO: 45727 - DNA, 22 bp, synthetic construct
  misc_feature 1..22: note = chemically synthesized
  source 1..22: mol_type = other DNA
cagtttgttcctaagtgtttcc

SEQ ID NO: 45728 - DNA, 22 bp, synthetic construct
  misc_feature 1..22: note = chemically synthesized
  source 1..22: mol_type = other DNA
gttcctaagtgtttccagaggc

SEQ ID NO: 45729 - DNA, 22 bp, synthetic construct
  misc_feature 1..22: note = chemically synthesized
  source 1..22: mol_type = other DNA
ttcctaagtgtttccagaggct

SEQ ID NO: 45730 - DNA, 22 bp, synthetic construct
  misc_feature 1..22: note = chemically synthesized
  source 1..22: mol_type = other DNA
ctaagtgtttccagaggcttgg

SEQ ID NO: 45731 - DNA, 22 bp, synthetic construct
  misc_feature 1..22: note = chemically synthesized
  source 1..22: mol_type = other DNA
agtgtttccagaggcttggttc

SEQ ID NO: 45732 - DNA, 22 bp, synthetic construct
  misc_feature 1..22: note = chemically synthesized
  source 1..22: mol_type = other DNA
ccagaggcttggttcctcttca

SEQ ID NO: 45733 - DNA, 22 bp, synthetic construct
  misc_feature 1..22: note = chemically synthesized
  source 1..22: mol_type = other DNA
cagaggcttggttcctcttcac

SEQ ID NO: 45734 - DNA, 22 bp, synthetic construct
  misc_feature 1..22: note = chemically synthesized
  source 1..22: mol_type = other DNA
ggttcctcttcacctgaggtag

SEQ ID NO: 45735 - DNA, 22 bp, synthetic construct
  misc_feature 1..22: note = chemically synthesized
  source 1..22: mol_type = other DNA
gttcctcttcacctgaggtaga

SEQ ID NO: 45736 - DNA, 22 bp, synthetic construct
  misc_feature 1..22: note = chemically synthesized
  source 1..22: mol_type = other DNA
ctcttcacctgaggtagagatt

SEQ ID NO: 45737 - DNA, 22 bp, synthetic construct
  misc_feature 1..22: note = chemically synthesized
  source 1..22: mol_type = other DNA
ttcacctgaggtagagattgac

SEQ ID NO: 45738 - DNA, 22 bp, synthetic construct
  misc_feature 1..22: note = chemically synthesized
  source 1..22: mol_type = other DNA
cacctgaggtagagattgacca

SEQ ID NO: 45739 - DNA, 22 bp, synthetic construct
  misc_feature 1..22: note = chemically synthesized
  source 1..22: mol_type = other DNA
acctgaggtagagattgaccaa

SEQ ID NO: 45740 - DNA, 22 bp, synthetic construct
  misc_feature 1..22: note = chemically synthesized
  source 1..22: mol_type = other DNA
aggtagagattgaccaattatt

SEQ ID NO: 45741 - DNA, 22 bp, synthetic construct
  misc_feature 1..22: note = chemically synthesized
  source 1..22: mol_type = other DNA
accaattatttattccagttaa

SEQ ID NO: 45742 - DNA, 22 bp, synthetic construct
  misc_feature 1..22: note = chemically synthesized
  source 1..22: mol_type = other DNA
tttattccagttaaaagtaggc

SEQ ID NO: 45743 - DNA, 22 bp, synthetic construct
  misc_feature 1..22: note = chemically synthesized
  source 1..22: mol_type = other DNA
attccagttaaaagtaggctta

SEQ ID NO: 45744 - DNA, 22 bp, synthetic construct
  misc_feature 1..22: note = chemically synthesized
  source 1..22: mol_type = other DNA
ttccagttaaaagtaggcttat

SEQ ID NO: 45745 - DNA, 22 bp, synthetic construct
  misc_feature 1..22: note = chemically synthesized
  source 1..22: mol_type = other DNA
cagttaaaagtaggcttatttc

SEQ ID NO: 45746 - DNA, 22 bp, synthetic construct
  misc_feature 1..22: note = chemically synthesized
  source 1..22: mol_type = other DNA
aaagtaggcttatttcaaaagg

SEQ ID NO: 45747 - DNA, 22 bp, synthetic construct
  misc_feature 1..22: note = chemically synthesized
  source 1..22: mol_type = other DNA
atttcaaaaggcagagaatttg

SEQ ID NO: 45748 - DNA, 22 bp, synthetic construct
  misc_feature 1..22: note = chemically synthesized
  source 1..22: mol_type = other DNA
tttcaaaaggcagagaatttga

SEQ ID NO: 45749 - DNA, 22 bp, synthetic construct
  misc_feature 1..22: note = chemically synthesized
  source 1..22: mol_type = other DNA
caaaaggcagagaatttgaagc

SEQ ID NO: 45750 - DNA, 22 bp, synthetic construct
  misc_feature 1..22: note = chemically synthesized
  source 1..22: mol_type = other DNA
aaaaggcagagaatttgaagct

SEQ ID NO: 45751 - DNA, 22 bp, synthetic construct
  misc_feature 1..22: note = chemically synthesized
  source 1..22: mol_type = other DNA
gaagctatcggggaaaggaact

SEQ ID NO: 45752 - DNA, 22 bp, synthetic construct
  misc_feature 1..22: note = chemically synthesized
  source 1..22: mol_type = other DNA
aagctatcggggaaaggaactg

SEQ ID NO: 45753 - DNA, 22 bp, synthetic construct
  misc_feature 1..22: note = chemically synthesized
  source 1..22: mol_type = other DNA
tcggggaaaggaactgtggcag

SEQ ID NO: 45754 - DNA, 22 bp, synthetic construct
  misc_feature 1..22: note = chemically synthesized
  source 1..22: mol_type = other DNA
tggcagatagtgcctgctgtgt

SEQ ID NO: 45755 - DNA, 22 bp, synthetic construct
  misc_feature 1..22: note = chemically synthesized
  source 1..22: mol_type = other DNA
ctgtgtgtggtggaggattctc

SEQ ID NO: 45756 - DNA, 22 bp, synthetic construct
  misc_feature 1..22: note = chemically synthesized
  source 1..22: mol_type = other DNA
tgtgtggtggaggattctctgc

SEQ ID NO: 45757 - DNA, 22 bp, synthetic construct
  misc_feature 1..22: note = chemically synthesized
  source 1..22: mol_type = other DNA
tctgctcagtcctgactcaggc

SEQ ID NO: 45758 - DNA, 22 bp, synthetic construct
  misc_feature 1..22: note = chemically synthesized
  source 1..22: mol_type = other DNA
tgctcagtcctgactcaggcta

SEQ ID NO: 45759 - DNA, 22 bp, synthetic construct
  misc_feature 1..22: note = chemically synthesized
  source 1..22: mol_type = other DNA
ctcagtcctgactcaggctagg

SEQ ID NO: 45760 - DNA, 22 bp, synthetic construct
  misc_feature 1..22: note = chemically synthesized
  source 1..22: mol_type = other DNA
agtcctgactcaggctaggaag

SEQ ID NO: 45761 - DNA, 22 bp, synthetic construct
  misc_feature 1..22: note = chemically synthesized
  source 1..22: mol_type = other DNA
actcaggctaggaaggaacagg

SEQ ID NO: 45762 - DNA, 22 bp, synthetic construct
  misc_feature 1..22: note = chemically synthesized
  source 1..22: mol_type = other DNA
aggctaggaaggaacagggcag

SEQ ID NO: 45763 - DNA, 22 bp, synthetic construct
  misc_feature 1..22: note = chemically synthesized
  source 1..22: mol_type = other DNA
ggaaggaacagggcagtgctga

SEQ ID NO: 45764 - DNA, 22 bp, synthetic construct
  misc_feature 1..22: note = chemically synthesized
  source 1..22: mol_type = other DNA
caggagactcagcactgccctg

SEQ ID NO: 45765 - DNA, 22 bp, synthetic construct
  misc_feature 1..22: note = chemically synthesized
  source 1..22: mol_type = other DNA
agcactgccctgttccttccta

SEQ ID NO: 45766 - DNA, 22 bp, synthetic construct
  misc_feature 1..22: note = chemically synthesized
  source 1..22: mol_type = other DNA
ccctgttccttcctagcctgag

SEQ ID NO: 45767 - DNA, 22 bp, synthetic construct
  misc_feature 1..22: note = chemically synthesized
  source 1..22: mol_type = other DNA
ttccttcctagcctgagtcagg

SEQ ID NO: 45768 - DNA, 22 bp, synthetic construct
  misc_feature 1..22: note = chemically synthesized
  source 1..22: mol_type = other DNA
cttcctagcctgagtcaggact

SEQ ID NO: 45769 - DNA, 22 bp, synthetic construct
  misc_feature 1..22: note = chemically synthesized
  source 1..22: mol_type = other DNA
cctagcctgagtcaggactgag

SEQ ID NO: 45770 - DNA, 22 bp, synthetic construct
  misc_feature 1..22: note = chemically synthesized
  source 1..22: mol_type = other DNA
ctagcctgagtcaggactgagc

SEQ ID NO: 45771 - DNA, 22 bp, synthetic construct
  misc_feature 1..22: note = chemically synthesized
  source 1..22: mol_type = other DNA
gcctgagtcaggactgagcaga

SEQ ID NO: 45772 - DNA, 22 bp, synthetic construct
  misc_feature 1..22: note = chemically synthesized
  source 1..22: mol_type = other DNA
agtcaggactgagcagagaatc

SEQ ID NO: 45773 - DNA, 22 bp, synthetic construct
  misc_feature 1..22: note = chemically synthesized
  source 1..22: mol_type = other DNA
agcagagaatcctccaccacac

SEQ ID NO: 45774 - DNA, 22 bp, synthetic construct
  misc_feature 1..22: note = chemically synthesized
  source 1..22: mol_type = other DNA
caccacacacagcaggcactat

SEQ ID NO: 45775 - DNA, 22 bp, synthetic construct
  misc_feature 1..22: note = chemically synthesized
  source 1..22: mol_type = other DNA
tctgccacagttcctttccccg

SEQ ID NO: 45776 - DNA, 22 bp, synthetic construct
  misc_feature 1..22: note = chemically synthesized
  source 1..22: mol_type = other DNA
ccacagttcctttccccgatag

SEQ ID NO: 45777 - DNA, 22 bp, synthetic construct
  misc_feature 1..22: note = chemically synthesized
  source 1..22: mol_type = other DNA
ctttccccgatagcttcaaatt

SEQ ID NO: 45778 - DNA, 22 bp, synthetic construct
  misc_feature 1..22: note = chemically synthesized
  source 1..22: mol_type = other DNA
tccccgatagcttcaaattctc

SEQ ID NO: 45779 - DNA, 22 bp, synthetic construct
  misc_feature 1..22: note = chemically synthesized
  source 1..22: mol_type = other DNA
ccccgatagcttcaaattctct

SEQ ID NO: 45780 - DNA, 22 bp, synthetic construct
  misc_feature 1..22: note = chemically synthesized
  source 1..22: mol_type = other DNA
cccgatagcttcaaattctctg

SEQ ID NO: 45781 - DNA, 22 bp, synthetic construct
  misc_feature 1..22: note = chemically synthesized
  source 1..22: mol_type = other DNA
caaattctctgccttttgaaat

SEQ ID NO: 45782 - DNA, 22 bp, synthetic construct
  misc_feature 1..22: note = chemically synthesized
  source 1..22: mol_type = other DNA
aaattctctgccttttgaaata

SEQ ID NO: 45783 - DNA, 22 bp, synthetic construct
  misc_feature 1..22: note = chemically synthesized
  source 1..22: mol_type = other DNA
tctgccttttgaaataagccta

SEQ ID NO: 45784 - DNA, 22 bp, synthetic construct
  misc_feature 1..22: note = chemically synthesized
  source 1..22: mol_type = other DNA
tgccttttgaaataagcctact

SEQ ID NO: 45785 - DNA, 22 bp, synthetic construct
  misc_feature 1..22: note = chemically synthesized
  source 1..22: mol_type = other DNA
ccttttgaaataagcctacttt

SEQ ID NO: 45786 - DNA, 22 bp, synthetic construct
  misc_feature 1..22: note = chemically synthesized
  source 1..22: mol_type = other DNA
ttgaaataagcctacttttaac

SEQ ID NO: 45787 - DNA, 22 bp, synthetic construct
  misc_feature 1..22: note = chemically synthesized
  source 1..22: mol_type = other DNA
tgaaataagcctacttttaact

SEQ ID NO: 45788 - DNA, 22 bp, synthetic construct
  misc_feature 1..22: note = chemically synthesized
  source 1..22: mol_type = other DNA
gaaataagcctacttttaactg

SEQ ID NO: 45789 - DNA, 22 bp, synthetic construct
  misc_feature 1..22: note = chemically synthesized
  source 1..22: mol_type = other DNA
aaataagcctacttttaactgg

SEQ ID NO: 45790 - DNA, 22 bp, synthetic construct
  misc_feature 1..22: note = chemically synthesized
  source 1..22: mol_type = other DNA
cttttaactggaataaataatt

SEQ ID NO: 45791 - DNA, 22 bp, synthetic construct
  misc_feature 1..22: note = chemically synthesized
  source 1..22: mol_type = other DNA
ttaactggaataaataattggt

SEQ ID NO: 45792 - DNA, 22 bp, synthetic construct
  misc_feature 1..22: note = chemically synthesized
  source 1..22: mol_type = other DNA
taactggaataaataattggtc

SEQ ID NO: 45793 - DNA, 22 bp, synthetic construct
  misc_feature 1..22: note = chemically synthesized
  source 1..22: mol_type = other DNA
aactggaataaataattggtca

SEQ ID NO: 45794 - DNA, 22 bp, synthetic construct
  misc_feature 1..22: note = chemically synthesized
  source 1..22: mol_type = other DNA
actggaataaataattggtcaa

SEQ ID NO: 45795 - DNA, 22 bp, synthetic construct
  misc_feature 1..22: note = chemically synthesized
  source 1..22: mol_type = other DNA
gaataaataattggtcaatctc

SEQ ID NO: 45796 - DNA, 22 bp, synthetic construct
  misc_feature 1..22: note = chemically synthesized
  source 1..22: mol_type = other DNA
gtcaatctctacctcaggtgaa

SEQ ID NO: 45797 - DNA, 22 bp, synthetic construct
  misc_feature 1..22: note = chemically synthesized
  source 1..22: mol_type = other DNA
tacctcaggtgaagaggaacca

SEQ ID NO: 45798 - DNA, 22 bp, synthetic construct
  misc_feature 1..22: note = chemically synthesized
  source 1..22: mol_type = other DNA
cctcaggtgaagaggaaccaag

SEQ ID NO: 45799 - DNA, 22 bp, synthetic construct
  misc_feature 1..22: note = chemically synthesized
  source 1..22: mol_type = other DNA
aggtgaagaggaaccaagcctc

SEQ ID NO: 45800 - DNA, 22 bp, synthetic construct
  misc_feature 1..22: note = chemically synthesized
  source 1..22: mol_type = other DNA
tggaaacacttaggaacaaact

SEQ ID NO: 45801 - DNA, 22 bp, synthetic construct
  misc_feature 1..22: note = chemically synthesized
  source 1..22: mol_type = other DNA
gaaacacttaggaacaaactgt

SEQ ID NO: 45802 - DNA, 22 bp, synthetic construct
  misc_feature 1..22: note = chemically synthesized
  source 1..22: mol_type = other DNA
aggaacaaactgtaaaaaccaa

SEQ ID NO: 45803 - DNA, 22 bp, synthetic construct
  misc_feature 1..22: note = chemically synthesized
  source 1..22: mol_type = other DNA
ggaacaaactgtaaaaaccaaa

SEQ ID NO: 45804 - DNA, 22 bp, synthetic construct
  misc_feature 1..22: note = chemically synthesized
  source 1..22: mol_type = other DNA
taaaaaccaaaggcaattgtgt

SEQ ID NO: 45805 - DNA, 22 bp, synthetic construct
  misc_feature 1..22: note = chemically synthesized
  source 1..22: mol_type = other DNA
tgtaaccggttaaataagcttg

SEQ ID NO: 45806 - DNA, 22 bp, synthetic construct
  misc_feature 1..22: note = chemically synthesized
  source 1..22: mol_type = other DNA
aataagcttgctggactttgtc

SEQ ID NO: 45807 - DNA, 22 bp, synthetic construct
  misc_feature 1..22: note = chemically synthesized
  source 1..22: mol_type = other DNA
gctggactttgtccctgtgtat

SEQ ID NO: 45808 - DNA, 22 bp, synthetic construct
  misc_feature 1..22: note = chemically synthesized
  source 1..22: mol_type = other DNA
ctggactttgtccctgtgtatg

SEQ ID NO: 45809 - DNA, 22 bp, synthetic construct
  misc_feature 1..22: note = chemically synthesized
  source 1..22: mol_type = other DNA
gactttgtccctgtgtatgagt

SEQ ID NO: 45810 - DNA, 22 bp, synthetic construct
  misc_feature 1..22: note = chemically synthesized
  source 1..22: mol_type = other DNA
tgtccctgtgtatgagttagac

SEQ ID NO: 45811 - DNA, 22 bp, synthetic construct
  misc_feature 1..22: note = chemically synthesized
  source 1..22: mol_type = other DNA
gtccctgtgtatgagttagaca

SEQ ID NO: 45812 - DNA, 22 bp, synthetic construct
  misc_feature 1..22: note = chemically synthesized
  source 1..22: mol_type = other DNA
tccctgtgtatgagttagacaa

SEQ ID NO: 45813 - DNA, 22 bp, synthetic construct
  misc_feature 1..22: note = chemically synthesized
  source 1..22: mol_type = other DNA
tgtatgagttagacaattcttt

SEQ ID NO: 45814 - DNA, 22 bp, synthetic construct
  misc_feature 1..22: note = chemically synthesized
  source 1..22: mol_type = other DNA
gacaattctttcagctagtttg

SEQ ID NO: 45815 - DNA, 22 bp, synthetic construct
  misc_feature 1..22: note = chemically synthesized
  source 1..22: mol_type = other DNA
tttcagctagtttgagtgacgc

SEQ ID NO: 45816 - DNA, 22 bp, synthetic construct
  misc_feature 1..22: note = chemically synthesized
  source 1..22: mol_type = other DNA
tcagctagtttgagtgacgcac

SEQ ID NO: 45817 - DNA, 22 bp, synthetic construct
  misc_feature 1..22: note = chemically synthesized
  source 1..22: mol_type = other DNA
cagctagtttgagtgacgcact

SEQ ID NO: 45818 - DNA, 22 bp, synthetic construct
  misc_feature 1..22: note = chemically synthesized
  source 1..22: mol_type = other DNA
agctagtttgagtgacgcactg

SEQ ID NO: 45819 - DNA, 22 bp, synthetic construct
  misc_feature 1..22: note = chemically synthesized
  source 1..22: mol_type = other DNA
gtttgagtgacgcactgaccag

SEQ ID NO: 45820 - DNA, 22 bp, synthetic construct
  misc_feature 1..22: note = chemically synthesized
  source 1..22: mol_type = other DNA
gagtgacgcactgaccagtgaa

SEQ ID NO: 45821 - DNA, 22 bp, synthetic construct
  misc_feature 1..22: note = chemically synthesized
  source 1..22: mol_type = other DNA
agtgacgcactgaccagtgaag

SEQ ID NO: 45822 - DNA, 22 bp, synthetic construct
  misc_feature 1..22: note = chemically synthesized
  source 1..22: mol_type = other DNA
accagtgaagcgcagtgaagca

SEQ ID NO: 45823 - DNA, 22 bp, synthetic construct
  misc_feature 1..22: note = chemically synthesized
  source 1..22: mol_type = other DNA
gaaggagaaagaagcattgtgg

SEQ ID NO: 45824 - DNA, 22 bp, synthetic construct
  misc_feature 1..22: note = chemically synthesized
  source 1..22: mol_type = other DNA
aaggagaaagaagcattgtggc

SEQ ID NO: 45825 - DNA, 22 bp, synthetic construct
  misc_feature 1..22: note = chemically synthesized
  source 1..22: mol_type = other DNA
tggctttatatcctctgggcct

SEQ ID NO: 45826 - DNA, 22 bp, synthetic construct
  misc_feature 1..22: note = chemically synthesized
  source 1..22: mol_type = other DNA
tatatcctctgggcctgggttt

SEQ ID NO: 45827 - DNA, 22 bp, synthetic construct
  misc_feature 1..22: note = chemically synthesized
  source 1..22: mol_type = other DNA
atatcctctgggcctgggtttc

SEQ ID NO: 45828 - DNA, 22 bp, synthetic construct
  misc_feature 1..22: note = chemically synthesized
  source 1..22: mol_type = other DNA
tatcctctgggcctgggtttcc

SEQ ID NO: 45829 - DNA, 22 bp, synthetic construct
  misc_feature 1..22: note = chemically synthesized
  source 1..22: mol_type = other DNA
tgggcctgggtttcctgaagtc

SEQ ID NO: 45830 - DNA, 22 bp, synthetic construct
  misc_feature 1..22: note = chemically synthesized
  source 1..22: mol_type = other DNA
ggcctgggtttcctgaagtcac

SEQ ID NO: 45831 - DNA, 22 bp, synthetic construct
  misc_feature 1..22: note = chemically synthesized
  source 1..22: mol_type = other DNA
ggtttcctgaagtcaccacaca

SEQ ID NO: 45832 - DNA, 22 bp, synthetic construct
  misc_feature 1..22: note = chemically synthesized
  source 1..22: mol_type = other DNA
cctgaagtcaccacacatagag

SEQ ID NO: 45833 - DNA, 22 bp, synthetic construct
  misc_feature 1..22: note = chemically synthesized
  source 1..22: mol_type = other DNA
ctgaagtcaccacacatagagg

SEQ ID NO: 45834 - DNA, 22 bp, synthetic construct
  misc_feature 1..22: note = chemically synthesized
  source 1..22: mol_type = other DNA
aagtcaccacacatagaggaga

SEQ ID NO: 45835 - DNA, 22 bp, synthetic construct
  misc_feature 1..22: note = chemically synthesized
  source 1..22: mol_type = other DNA
agttaaaggtaagaaaccatct

SEQ ID NO: 45836 - DNA, 22 bp, synthetic construct
  misc_feature 1..22: note = chemically synthesized
  source 1..22: mol_type = other DNA
aaggtaagaaaccatctgacaa

SEQ ID NO: 45837 - DNA, 22 bp, synthetic construct
  misc_feature 1..22: note = chemically synthesized
  source 1..22: mol_type = other DNA
acaagtttgctatggcttcttc

SEQ ID NO: 45838 - DNA, 22 bp, synthetic construct
  misc_feature 1..22: note = chemically synthesized
  source 1..22: mol_type = other DNA
gctatggcttcttcagccaaaa

SEQ ID NO: 45839 - DNA, 22 bp, synthetic construct
  misc_feature 1..22: note = chemically synthesized
  source 1..22: mol_type = other DNA
ctatggcttcttcagccaaaat

SEQ ID NO: 45840 - DNA, 22 bp, synthetic construct
  misc_feature 1..22: note = chemically synthesized
  source 1..22: mol_type = other DNA
tggcttcttcagccaaaattta

SEQ ID NO: 45841 - DNA, 22 bp, synthetic construct
  misc_feature 1..22: note = chemically synthesized
  source 1..22: mol_type = other DNA
cttcagccaaaatttatggaag

SEQ ID NO: 45842 - DNA, 22 bp, synthetic construct
  misc_feature 1..22: note = chemically synthesized
  source 1..22: mol_type = other DNA
ttcagccaaaatttatggaagt

SEQ ID NO: 45843 - DNA, 22 bp, synthetic construct
  misc_feature 1..22: note = chemically synthesized
  source 1..22: mol_type = other DNA
cagccaaaatttatggaagttt

SEQ ID NO: 45844 - DNA, 22 bp, synthetic construct
  misc_feature 1..22: note = chemically synthesized
  source 1..22: mol_type = other DNA
agccaaaatttatggaagtttc

SEQ ID NO: 45845 - DNA, 22 bp, synthetic construct
  misc_feature 1..22: note = chemically synthesized
  source 1..22: mol_type = other DNA
atggaagtttctgagaacttca

SEQ ID NO: 45846 - DNA, 22 bp, synthetic construct
  misc_feature 1..22: note = chemically synthesized
  source 1..22: mol_type = other DNA
tggaagtttctgagaacttcag

SEQ ID NO: 45847 - DNA, 22 bp, synthetic construct
  misc_feature 1..22: note = chemically synthesized
  source 1..22: mol_type = other DNA
ctgagaacttcagggtatcaga

SEQ ID NO: 45848 - DNA, 22 bp, synthetic construct
  misc_feature 1..22: note = chemically synthesized
  source 1..22: mol_type = other DNA
tgagaacttcagggtatcagag

SEQ ID NO: 45849 - DNA, 22 bp, synthetic construct
  misc_feature 1..22: note = chemically synthesized
  source 1..22: mol_type = other DNA
agaacttcagggtatcagagtt

SEQ ID NO: 45850 - DNA, 22 bp, synthetic construct
  misc_feature 1..22: note = chemically synthesized
  source 1..22: mol_type = other DNA
cagggtatcagagttggaaaag

SEQ ID NO: 45851 - DNA, 22 bp, synthetic construct
  misc_feature 1..22: note = chemically synthesized
  source 1..22: mol_type = other DNA
agggtatcagagttggaaaaga

SEQ ID NO: 45852 - DNA, 22 bp, synthetic construct
  misc_feature 1..22: note = chemically synthesized
  source 1..22: mol_type = other DNA
gaaaagacttagagaggccctg

SEQ ID NO: 45853 - DNA, 22 bp, synthetic construct
  misc_feature 1..22: note = chemically synthesized
  source 1..22: mol_type = other DNA
agagaggccctggttcaaaccc

SEQ ID NO: 45854 - DNA, 22 bp, synthetic construct
  misc_feature 1..22: note = chemically synthesized
  source 1..22: mol_type = other DNA
gagaggccctggttcaaacccc

SEQ ID NO: 45855 - DNA, 22 bp, synthetic construct
  misc_feature 1..22: note = chemically synthesized
  source 1..22: mol_type = other DNA
gttcaaacccctgtgttcagag

SEQ ID NO: 45856 - DNA, 22 bp, synthetic construct
  misc_feature 1..22: note = chemically synthesized
  source 1..22: mol_type = other DNA
aaacccctgtgttcagaggctt

SEQ ID NO: 45857 - DNA, 22 bp, synthetic construct
  misc_feature 1..22: note = chemically synthesized
  source 1..22: mol_type = other DNA
tgttcagaggcttccctgtggt

SEQ ID NO: 45858 - DNA, 22 bp, synthetic construct
  misc_feature 1..22: note = chemically synthesized
  source 1..22: mol_type = other DNA
agaggcttccctgtggtgtctg

SEQ ID NO: 45859 - DNA, 22 bp, synthetic construct
  misc_feature 1..22: note = chemically synthesized
  source 1..22: mol_type = other DNA
ccctgtggtgtctgtgggcaca

SEQ ID NO: 45860 - DNA, 22 bp, synthetic construct
  misc_feature 1..22: note = chemically synthesized
  source 1..22: mol_type = other DNA
cctgtggtgtctgtgggcacag

SEQ ID NO: 45861 - DNA, 22 bp, synthetic construct
  misc_feature 1..22: note = chemically synthesized
  source 1..22: mol_type = other DNA
tggtgtctgtgggcacagctgg

SEQ ID NO: 45862 - DNA, 22 bp, synthetic construct
  misc_feature 1..22: note = chemically synthesized
  source 1..22: mol_type = other DNA
tgggcacagctggagctgaaga

SEQ ID NO: 45863 - DNA, 22 bp, synthetic construct
  misc_feature 1..22: note = chemically synthesized
  source 1..22: mol_type = other DNA
gagctgaagaacaagggaaagg

SEQ ID NO: 45864 - DNA, 22 bp, synthetic construct
  misc_feature 1..22: note = chemically synthesized
  source 1..22: mol_type = other DNA
aagaacaagggaaaggtgataa

SEQ ID NO: 45865 - DNA, 22 bp, synthetic construct
  misc_feature 1..22: note = chemically synthesized
  source 1..22: mol_type = other DNA
ttattggtcatcccttgccttt

SEQ ID NO: 45866 - DNA, 22 bp, synthetic construct
  misc_feature 1..22: note = chemically synthesized
  source 1..22: mol_type = other DNA
attggtcatcccttgcctttgt

SEQ ID NO: 45867 - DNA, 22 bp, synthetic construct
  misc_feature 1..22: note = chemically synthesized
  source 1..22: mol_type = other DNA
ttggtcatcccttgcctttgtt

SEQ ID NO: 45868 - DNA, 22 bp, synthetic construct
  misc_feature 1..22: note = chemically synthesized
  source 1..22: mol_type = other DNA
gtcatcccttgcctttgttcat

SEQ ID NO: 45869 - DNA, 22 bp, synthetic construct
  misc_feature 1..22: note = chemically synthesized
  source 1..22: mol_type = other DNA
gcctttgttcatttcaattatt

SEQ ID NO: 45870 - DNA, 22 bp, synthetic construct
  misc_feature 1..22: note = chemically synthesized
  source 1..22: mol_type = other DNA
cctttgttcatttcaattattg

SEQ ID NO: 45871 - DNA, 22 bp, synthetic construct
  misc_feature 1..22: note = chemically synthesized
  source 1..22: mol_type = other DNA
tgttcatttcaattattgtctt

SEQ ID NO: 45872 - DNA, 22 bp, synthetic construct
  misc_feature 1..22: note = chemically synthesized
  source 1..22: mol_type = other DNA
gttcatttcaattattgtcttg

SEQ ID NO: 45873 - DNA, 22 bp, synthetic construct
  misc_feature 1..22: note = chemically synthesized
  source 1..22: mol_type = other DNA
ttcatttcaattattgtcttgg

SEQ ID NO: 45874 - DNA, 22 bp, synthetic construct
  misc_feature 1..22: note = chemically synthesized
  source 1..22: mol_type = other DNA
atttcaattattgtcttggaaa

SEQ ID NO: 45875 - DNA, 22 bp, synthetic construct
  misc_feature 1..22: note = chemically synthesized
  source 1..22: mol_type = other DNA
caattattgtcttggaaatctg

SEQ ID NO: 45876 - DNA, 22 bp, synthetic construct
  misc_feature 1..22: note = chemically synthesized
  source 1..22: mol_type = other DNA
aattattgtcttggaaatctgt

SEQ ID NO: 45877 - DNA, 22 bp, synthetic construct
  misc_feature 1..22: note = chemically synthesized
  source 1..22: mol_type = other DNA
ttgtcttggaaatctgtagaca

SEQ ID NO: 45878 - DNA, 22 bp, synthetic construct
  misc_feature 1..22: note = chemically synthesized
  source 1..22: mol_type = other DNA
tcttggaaatctgtagacatcc

SEQ ID NO: 45879 - DNA, 22 bp, synthetic construct
  misc_feature 1..22: note = chemically synthesized
  source 1..22: mol_type = other DNA
ggaaatctgtagacatcctaag

SEQ ID NO: 45880 - DNA, 22 bp, synthetic construct
  misc_feature 1..22: note = chemically synthesized
  source 1..22: mol_type = other DNA
gaaatctgtagacatcctaaga

SEQ ID NO: 45881 - DNA, 22 bp, synthetic construct
  misc_feature 1..22: note = chemically synthesized
  source 1..22: mol_type = other DNA
tagacatcctaagagctcccct

SEQ ID NO: 45882 - DNA, 22 bp, synthetic construct
  misc_feature 1..22: note = chemically synthesized
  source 1..22: mol_type = other DNA
agagctcccctccactacggac

SEQ ID NO: 45883 - DNA, 22 bp, synthetic construct
  misc_feature 1..22: note = chemically synthesized
  source 1..22: mol_type = other DNA
ccctccactacggacatgcacg

SEQ ID NO: 45884 - DNA, 22 bp, synthetic construct
  misc_feature 1..22: note = chemically synthesized
  source 1..22: mol_type = other DNA
cactacggacatgcacgtttct

SEQ ID NO: 45885 - DNA, 22 bp, synthetic construct
  misc_feature 1..22: note = chemically synthesized
  source 1..22: mol_type = other DNA
cggacatgcacgtttctctcta

SEQ ID NO: 45886 - DNA, 22 bp, synthetic construct
  misc_feature 1..22: note = chemically synthesized
  source 1..22: mol_type = other DNA
ctctctatgtctttttcccaac

SEQ ID NO: 45887 - DNA, 22 bp, synthetic construct
  misc_feature 1..22: note = chemically synthesized
  source 1..22: mol_type = other DNA
tctctatgtctttttcccaacc

SEQ ID NO: 45888 - DNA, 22 bp, synthetic construct
  misc_feature 1..22: note = chemically synthesized
  source 1..22: mol_type = other DNA
tctatgtctttttcccaacccc

SEQ ID NO: 45889 - DNA, 22 bp, synthetic construct
  misc_feature 1..22: note = chemically synthesized
  source 1..22: mol_type = other DNA
tatgtctttttcccaacccctg

SEQ ID NO: 45890 - DNA, 22 bp, synthetic construct
  misc_feature 1..22: note = chemically synthesized
  source 1..22: mol_type = other DNA
tgtctttttcccaacccctgct

SEQ ID NO: 45891 - DNA, 22 bp, synthetic construct
  misc_feature 1..22: note = chemically synthesized
  source 1..22: mol_type = other DNA
tttcccaacccctgctctgaca

SEQ ID NO: 45892 - DNA, 22 bp, synthetic construct
  misc_feature 1..22: note = chemically synthesized
  source 1..22: mol_type = other DNA
ttcccaacccctgctctgacac

SEQ ID NO: 45893 - DNA, 22 bp, synthetic construct
  misc_feature 1..22: note = chemically synthesized
  source 1..22: mol_type = other DNA
tcccaacccctgctctgacacc

SEQ ID NO: 45894 - DNA, 22 bp, synthetic construct
  misc_feature 1..22: note = chemically synthesized
  source 1..22: mol_type = other DNA
cccaacccctgctctgacacct

SEQ ID NO: 45895 - DNA, 22 bp, synthetic construct
  misc_feature 1..22: note = chemically synthesized
  source 1..22: mol_type = other DNA
ccaacccctgctctgacacctt

SEQ ID NO: 45896 - DNA, 22 bp, synthetic construct
  misc_feature 1..22: note = chemically synthesized
  source 1..22: mol_type = other DNA
ctctgacaccttcccattgctg

SEQ ID NO: 45897 - DNA, 22 bp, synthetic construct
  misc_feature 1..22: note = chemically synthesized
  source 1..22: mol_type = other DNA
tgacaccttcccattgctgcag

SEQ ID NO: 45898 - DNA, 22 bp, synthetic construct
  misc_feature 1..22: note = chemically synthesized
  source 1..22: mol_type = other DNA
acaccttcccattgctgcagcc

SEQ ID NO: 45899 - DNA, 22 bp, synthetic construct
  misc_feature 1..22: note = chemically synthesized
  source 1..22: mol_type = other DNA
cccattgctgcagcctcatgga

SEQ ID NO: 45900 - DNA, 22 bp, synthetic construct
  misc_feature 1..22: note = chemically synthesized
  source 1..22: mol_type = other DNA
ccattgctgcagcctcatggac

SEQ ID NO: 45901 - DNA, 22 bp, synthetic construct
  misc_feature 1..22: note = chemically synthesized
  source 1..22: mol_type = other DNA
ctgcagcctcatggaccacttc

SEQ ID NO: 45902 - DNA, 22 bp, synthetic construct
  misc_feature 1..22: note = chemically synthesized
  source 1..22: mol_type = other DNA
cagcctcatggaccacttccgg

SEQ ID NO: 45903 - DNA, 22 bp, synthetic construct
  misc_feature 1..22: note = chemically synthesized
  source 1..22: mol_type = other DNA
atggaccacttccggtgaccag

SEQ ID NO: 45904 - DNA, 22 bp, synthetic construct
  misc_feature 1..22: note = chemically synthesized
  source 1..22: mol_type = other DNA
ccggtgaccagttagatatgct

SEQ ID NO: 45905 - DNA, 22 bp, synthetic construct
  misc_feature 1..22: note = chemically synthesized
  source 1..22: mol_type = other DNA
cggtgaccagttagatatgctt

SEQ ID NO: 45906 - DNA, 22 bp, synthetic construct
  misc_feature 1..22: note = chemically synthesized
  source 1..22: mol_type = other DNA
gatatgcttgatctatttagtt

SEQ ID NO: 45907 - DNA, 22 bp, synthetic construct
  misc_feature 1..22: note = chemically synthesized
  source 1..22: mol_type = other DNA
gatctatttagttaattaaggc

SEQ ID NO: 45908 - DNA, 22 bp, synthetic construct
  misc_feature 1..22: note = chemically synthesized
  source 1..22: mol_type = other DNA
atctatttagttaattaaggct

SEQ ID NO: 45909 - DNA, 22 bp, synthetic construct
  misc_feature 1..22: note = chemically synthesized
  source 1..22: mol_type = other DNA
tttagttaattaaggctctgaa

SEQ ID NO: 45910 - DNA, 22 bp, synthetic construct
  misc_feature 1..22: note = chemically synthesized
  source 1..22: mol_type = other DNA
agttaattaaggctctgaatca

SEQ ID NO: 45911 - DNA, 22 bp, synthetic construct
  misc_feature 1..22: note = chemically synthesized
  source 1..22: mol_type = other DNA
gttaattaaggctctgaatcag

SEQ ID NO: 45912 - DNA, 22 bp, synthetic construct
  misc_feature 1..22: note = chemically synthesized
  source 1..22: mol_type = other DNA
attaaggctctgaatcagccct

SEQ ID NO: 45913 - DNA, 22 bp, synthetic construct
  misc_feature 1..22: note = chemically synthesized
  source 1..22: mol_type = other DNA
aggctctgaatcagcccttggc

SEQ ID NO: 45914 - DNA, 22 bp, synthetic construct
  misc_feature 1..22: note = chemically synthesized
  source 1..22: mol_type = other DNA
tgaatcagcccttggccagaag

SEQ ID NO: 45915 - DNA, 22 bp, synthetic construct
  misc_feature 1..22: note = chemically synthesized
  source 1..22: mol_type = other DNA
aatcagcccttggccagaagaa

SEQ ID NO: 45916 - DNA, 22 bp, synthetic construct
  misc_feature 1..22: note = chemically synthesized
  source 1..22: mol_type = other DNA
ggccagaagaagcacctcctct

SEQ ID NO: 45917 - DNA, 22 bp, synthetic construct
  misc_feature 1..22: note = chemically synthesized
  source 1..22: mol_type = other DNA
gccagaagaagcacctcctcta

SEQ ID NO: 45918 - DNA, 22 bp, synthetic construct
  misc_feature 1..22: note = chemically synthesized
  source 1..22: mol_type = other DNA
ctctaggaaatcattccttctt

SEQ ID NO: 45919 - DNA, 22 bp, synthetic construct
  misc_feature 1..22: note = chemically synthesized
  source 1..22: mol_type = other DNA
taggaaatcattccttcttttt

SEQ ID NO: 45920 - DNA, 22 bp, synthetic construct
  misc_feature 1..22: note = chemically synthesized
  source 1..22: mol_type = other DNA
ggaaatcattccttctttttag

SEQ ID NO: 45921 - DNA, 22 bp, synthetic construct
  misc_feature 1..22: note = chemically synthesized
  source 1..22: mol_type = other DNA
cttctttttagtaatacgcaat

SEQ ID NO: 45922 - DNA, 22 bp, synthetic construct
  misc_feature 1..22: note = chemically synthesized
  source 1..22: mol_type = other DNA
ctttttagtaatacgcaattga

SEQ ID NO: 45923 - DNA, 22 bp, synthetic construct
  misc_feature 1..22: note = chemically synthesized
  source 1..22: mol_type = other DNA
tttttagtaatacgcaattgaa

SEQ ID NO: 45924 - DNA, 22 bp, synthetic construct
  misc_feature 1..22: note = chemically synthesized
  source 1..22: mol_type = other DNA
tttagtaatacgcaattgaaaa

SEQ ID NO: 45925 - DNA, 22 bp, synthetic construct
  misc_feature 1..22: note = chemically synthesized
  source 1..22: mol_type = other DNA
ttagtaatacgcaattgaaaag

SEQ ID NO: 45926 - DNA, 22 bp, synthetic construct
  misc_feature 1..22: note = chemically synthesized
  source 1..22: mol_type = other DNA
tagtaatacgcaattgaaaagt

SEQ ID NO: 45927 - DNA, 22 bp, synthetic construct
  misc_feature 1..22: note = chemically synthesized
  source 1..22: mol_type = other DNA
agtaatacgcaattgaaaagta

SEQ ID NO: 45928 - DNA, 22 bp, synthetic construct
  misc_feature 1..22: note = chemically synthesized
  source 1..22: mol_type = other DNA
gtaatacgcaattgaaaagtat

SEQ ID NO: 45929 - DNA, 22 bp, synthetic construct
  misc_feature 1..22: note = chemically synthesized
  source 1..22: mol_type = other DNA
aaaagtatgtgtgggttatgtg

SEQ ID NO: 45930 - DNA, 22 bp, synthetic construct
  misc_feature 1..22: note = chemically synthesized
  source 1..22: mol_type = other DNA
tgtgctgttaggtgctaagcat

SEQ ID NO: 45931 - DNA, 22 bp, synthetic construct
  misc_feature 1..22: note = chemically synthesized
  source 1..22: mol_type = other DNA
ttaggtgctaagcattttagct

SEQ ID NO: 45932 - DNA, 22 bp, synthetic construct
  misc_feature 1..22: note = chemically synthesized
  source 1..22: mol_type = other DNA
ggtgctaagcattttagctatg

SEQ ID NO: 45933 - DNA, 22 bp, synthetic construct
  misc_feature 1..22: note = chemically synthesized
  source 1..22: mol_type = other DNA
agcattttagctatgaattaac

SEQ ID NO: 45934 - DNA, 22 bp, synthetic construct
  misc_feature 1..22: note = chemically synthesized
  source 1..22: mol_type = other DNA
tagctatgaattaactcataat

SEQ ID NO: 45935 - DNA, 22 bp, synthetic construct
  misc_feature 1..22: note = chemically synthesized
  source 1..22: mol_type = other DNA
agctatgaattaactcataatc

SEQ ID NO: 45936 - DNA, 22 bp, synthetic construct
  misc_feature 1..22: note = chemically synthesized
  source 1..22: mol_type = other DNA
gctatgaattaactcataatcc

SEQ ID NO: 45937 - DNA, 22 bp, synthetic construct
  misc_feature 1..22: note = chemically synthesized
  source 1..22: mol_type = other DNA
tgaattaactcataatcctcaa

SEQ ID NO: 45938 - DNA, 22 bp, synthetic construct
  misc_feature 1..22: note = chemically synthesized
  source 1..22: mol_type = other DNA
actcataatcctcaaaataaat

SEQ ID NO: 45939 - DNA, 22 bp, synthetic construct
  misc_feature 1..22: note = chemically synthesized
  source 1..22: mol_type = other DNA
ataatcctcaaaataaatctgg

SEQ ID NO: 45940 - DNA, 22 bp, synthetic construct
  misc_feature 1..22: note = chemically synthesized
  source 1..22: mol_type = other DNA
aaaataaatctggggtatagag

SEQ ID NO: 45941 - DNA, 22 bp, synthetic construct
  misc_feature 1..22: note = chemically synthesized
  source 1..22: mol_type = other DNA
gggtatagagagaggttcttgt

SEQ ID NO: 45942 - DNA, 22 bp, synthetic construct
  misc_feature 1..22: note = chemically synthesized
  source 1..22: mol_type = other DNA
ttgtttcaattagaaaagtaat

SEQ ID NO: 45943 - DNA, 22 bp, synthetic construct
  misc_feature 1..22: note = chemically synthesized
  source 1..22: mol_type = other DNA
gtttcaattagaaaagtaatgc

SEQ ID NO: 45944 - DNA, 22 bp, synthetic construct
  misc_feature 1..22: note = chemically synthesized
  source 1..22: mol_type = other DNA
tttcaattagaaaagtaatgct

SEQ ID NO: 45945 - DNA, 22 bp, synthetic construct
  misc_feature 1..22: note = chemically synthesized
  source 1..22: mol_type = other DNA
caattagaaaagtaatgcttgg

SEQ ID NO: 45946 - DNA, 22 bp, synthetic construct
  misc_feature 1..22: note = chemically synthesized
  source 1..22: mol_type = other DNA
aattagaaaagtaatgcttgga

SEQ ID NO: 45947 - DNA, 22 bp, synthetic construct
  misc_feature 1..22: note = chemically synthesized
  source 1..22: mol_type = other DNA
gaaaagtaatgcttggagagac

SEQ ID NO: 45948 - DNA, 22 bp, synthetic construct
  misc_feature 1..22: note = chemically synthesized
  source 1..22: mol_type = other DNA
ggagagactatgatttgcccaa

SEQ ID NO: 45949 - DNA, 22 bp, synthetic construct
  misc_feature 1..22: note = chemically synthesized
  source 1..22: mol_type = other DNA
gagagactatgatttgcccaag

SEQ ID NO: 45950 - DNA, 22 bp, synthetic construct
  misc_feature 1..22: note = chemically synthesized
  source 1..22: mol_type = other DNA
tgatttgcccaaggtcactgcc

SEQ ID NO: 45951 - DNA, 22 bp, synthetic construct
  misc_feature 1..22: note = chemically synthesized
  source 1..22: mol_type = other DNA
gcccaaggtcactgccaataga

SEQ ID NO: 45952 - DNA, 22 bp, synthetic construct
  misc_feature 1..22: note = chemically synthesized
  source 1..22: mol_type = other DNA
cccaaggtcactgccaatagat

SEQ ID NO: 45953 - DNA, 22 bp, synthetic construct
  misc_feature 1..22: note = chemically synthesized
  source 1..22: mol_type = other DNA
ccaatagatgacttgattagaa

SEQ ID NO: 45954 - DNA, 22 bp, synthetic construct
  misc_feature 1..22: note = chemically synthesized
  source 1..22: mol_type = other DNA
gattagaagcagggtatgtttg

SEQ ID NO: 45955 - DNA, 22 bp, synthetic construct
  misc_feature 1..22: note = chemically synthesized
  source 1..22: mol_type = other DNA
attagaagcagggtatgtttga

SEQ ID NO: 45956 - DNA, 22 bp, synthetic construct
  misc_feature 1..22: note = chemically synthesized
  source 1..22: mol_type = other DNA
gaagcagggtatgtttgaatgc

SEQ ID NO: 45957 - DNA, 22 bp, synthetic construct
  misc_feature 1..22: note = chemically synthesized
  source 1..22: mol_type = other DNA
gaatgcgaagtccaggctcaaa

SEQ ID NO: 45958 - DNA, 22 bp, synthetic construct
  misc_feature 1..22: note = chemically synthesized
  source 1..22: mol_type = other DNA
aatgcgaagtccaggctcaaaa

SEQ ID NO: 45959 - DNA, 22 bp, synthetic construct
  misc_feature 1..22: note = chemically synthesized
  source 1..22: mol_type = other DNA
aaaaaggggccttagtggctcc

SEQ ID NO: 45960 - DNA, 22 bp, synthetic construct
  misc_feature 1..22: note = chemically synthesized
  source 1..22: mol_type = other DNA
agtggctcctactagactggta

SEQ ID NO: 45961 - DNA, 22 bp, synthetic construct
  misc_feature 1..22: note = chemically synthesized
  source 1..22: mol_type = other DNA
gtggctcctactagactggtat

SEQ ID NO: 45962 - DNA, 22 bp, synthetic construct
  misc_feature 1..22: note = chemically synthesized
  source 1..22: mol_type = other DNA
ctactagactggtatcttaagg

SEQ ID NO: 45963 - DNA, 22 bp, synthetic construct
  misc_feature 1..22: note = chemically synthesized
  source 1..22: mol_type = other DNA
ctagactggtatcttaaggcaa

SEQ ID NO: 45964 - DNA, 22 bp, synthetic construct
  misc_feature 1..22: note = chemically synthesized
  source 1..22: mol_type = other DNA
gactggtatcttaaggcaagga

SEQ ID NO: 45965 - DNA, 22 bp, synthetic construct
  misc_feature 1..22: note = chemically synthesized
  source 1..22: mol_type = other DNA
gtatcttaaggcaaggaaaaca

SEQ ID NO: 45966 - DNA, 22 bp, synthetic construct
  misc_feature 1..22: note = chemically synthesized
  source 1..22: mol_type = other DNA
aaggcaaggaaaacagaatatg

SEQ ID NO: 45967 - DNA, 22 bp, synthetic construct
  misc_feature 1..22: note = chemically synthesized
  source 1..22: mol_type = other DNA
aggcaaggaaaacagaatatgt

SEQ ID NO: 45968 - DNA, 22 bp, synthetic construct
  misc_feature 1..22: note = chemically synthesized
  source 1..22: mol_type = other DNA
atatctaaaaccatgcctagtg

SEQ ID NO: 45969 - DNA, 22 bp, synthetic construct
  misc_feature 1..22: note = chemically synthesized
  source 1..22: mol_type = other DNA
aaaccatgcctagtgcccaggc

SEQ ID NO: 45970 - DNA, 22 bp, synthetic construct
  misc_feature 1..22: note = chemically synthesized
  source 1..22: mol_type = other DNA
gtgcccaggccaggcttgaatc

SEQ ID NO: 45971 - DNA, 22 bp, synthetic construct
  misc_feature 1..22: note = chemically synthesized
  source 1..22: mol_type = other DNA
gaatcaatgctcaacgcatgca

SEQ ID NO: 45972 - DNA, 22 bp, synthetic construct
  misc_feature 1..22: note = chemically synthesized
  source 1..22: mol_type = other DNA
aatcaatgctcaacgcatgcat

SEQ ID NO: 45973 - DNA, 22 bp, synthetic construct
  misc_feature 1..22: note = chemically synthesized
  source 1..22: mol_type = other DNA
aacgcatgcatgtgtaactgaa

SEQ ID NO: 45974 - DNA, 22 bp, synthetic construct
  misc_feature 1..22: note = chemically synthesized
  source 1..22: mol_type = other DNA
aacagaactgcccagaaccttg

SEQ ID NO: 45975 - DNA, 22 bp, synthetic construct
  misc_feature 1..22: note = chemically synthesized
  source 1..22: mol_type = other DNA
cccagaaccttggctcaggcca

SEQ ID NO: 45976 - DNA, 22 bp, synthetic construct
  misc_feature 1..22: note = chemically synthesized
  source 1..22: mol_type = other DNA
ggctcaggccaagtaggccaga

SEQ ID NO: 45977 - DNA, 22 bp, synthetic construct
  misc_feature 1..22: note = chemically synthesized
  source 1..22: mol_type = other DNA
gctcaggccaagtaggccagac

SEQ ID NO: 45978 - DNA, 22 bp, synthetic construct
  misc_feature 1..22: note = chemically synthesized
  source 1..22: mol_type = other DNA
aggccaagtaggccagaccacc

SEQ ID NO: 45979 - DNA, 22 bp, synthetic construct
  misc_feature 1..22: note = chemically synthesized
  source 1..22: mol_type = other DNA
ccctgaatgcagggtttgagaa

SEQ ID NO: 45980 - DNA, 22 bp, synthetic construct
  misc_feature 1..22: note = chemically synthesized
  source 1..22: mol_type = other DNA
cctgaatgcagggtttgagaag

SEQ ID NO: 45981 - DNA, 22 bp, synthetic construct
  misc_feature 1..22: note = chemically synthesized
  source 1..22: mol_type = other DNA
aatgcagggtttgagaagtgcc

SEQ ID NO: 45982 - DNA, 22 bp, synthetic construct
  misc_feature 1..22: note = chemically synthesized
  source 1..22: mol_type = other DNA
gagaagtgccctaatgccctct

SEQ ID NO: 45983 - DNA, 22 bp, synthetic construct
  misc_feature 1..22: note = chemically synthesized
  source 1..22: mol_type = other DNA
agaagtgccctaatgccctcta

SEQ ID NO: 45984 - DNA, 22 bp, synthetic construct
  misc_feature 1..22: note = chemically synthesized
  source 1..22: mol_type = other DNA
atgccctctaactgatgctgag

SEQ ID NO: 45985 - DNA, 22 bp, synthetic construct
  misc_feature 1..22: note = chemically synthesized
  source 1..22: mol_type = other DNA
taactgatgctgagtttgaaga

SEQ ID NO: 45986 - DNA, 22 bp, synthetic construct
  misc_feature 1..22: note = chemically synthesized
  source 1..22: mol_type = other DNA
actgatgctgagtttgaagaat

SEQ ID NO: 45987 - DNA, 22 bp, synthetic construct
  misc_feature 1..22: note = chemically synthesized
  source 1..22: mol_type = other DNA
atgctgagtttgaagaatccat

SEQ ID NO: 45988 - DNA, 22 bp, synthetic construct
  misc_feature 1..22: note = chemically synthesized
  source 1..22: mol_type = other DNA
agtttgaagaatccatcagtta

SEQ ID NO: 45989 - DNA, 22 bp, synthetic construct
  misc_feature 1..22: note = chemically synthesized
  source 1..22: mol_type = other DNA
gaagaatccatcagttaagggg

SEQ ID NO: 45990 - DNA, 22 bp, synthetic construct
  misc_feature 1..22: note = chemically synthesized
  source 1..22: mol_type = other DNA
aagaatccatcagttaagggga

SEQ ID NO: 45991 - DNA, 22 bp, synthetic construct
  misc_feature 1..22: note = chemically synthesized
  source 1..22: mol_type = other DNA
aggggaggtgtttctgagtttg

SEQ ID NO: 45992 - DNA, 22 bp, synthetic construct
  misc_feature 1..22: note = chemically synthesized
  source 1..22: mol_type = other DNA
ctgagtttgaagaatcaaacac

SEQ ID NO: 45993 - DNA, 22 bp, synthetic construct
  misc_feature 1..22: note = chemically synthesized
  source 1..22: mol_type = other DNA
tgagtttgaagaatcaaacacc

SEQ ID NO: 45994 - DNA, 22 bp, synthetic construct
  misc_feature 1..22: note = chemically synthesized
  source 1..22: mol_type = other DNA
agtttgaagaatcaaacacctt

SEQ ID NO: 45995 - DNA, 22 bp, synthetic construct
  misc_feature 1..22: note = chemically synthesized
  source 1..22: mol_type = other DNA
gaagaatcaaacaccttcctaa

SEQ ID NO: 45996 - DNA, 22 bp, synthetic construct
  misc_feature 1..22: note = chemically synthesized
  source 1..22: mol_type = other DNA
aagaatcaaacaccttcctaat

SEQ ID NO: 45997 - DNA, 22 bp, synthetic construct
  misc_feature 1..22: note = chemically synthesized
  source 1..22: mol_type = other DNA
cctaattggtaggaatcctgaa

SEQ ID NO: 45998 - DNA, 22 bp, synthetic construct
  misc_feature 1..22: note = chemically synthesized
  source 1..22: mol_type = other DNA
ctaattggtaggaatcctgaaa

SEQ ID NO: 45999 - DNA, 22 bp, synthetic construct
  misc_feature 1..22: note = chemically synthesized
  source 1..22: mol_type = other DNA
attggtaggaatcctgaaaaca

SEQ ID NO: 46000 - DNA, 22 bp, synthetic construct
  misc_feature 1..22: note = chemically synthesized
  source 1..22: mol_type = other DNA
gtaggaatcctgaaaacactcc

SEQ ID NO: 46001 - DNA, 22 bp, synthetic construct
  misc_feature 1..22: note = chemically synthesized
  source 1..22: mol_type = other DNA
aaaacactccacaccggagtaa

SEQ ID NO: 46002 - DNA, 22 bp, synthetic construct
  misc_feature 1..22: note = chemically synthesized
  source 1..22: mol_type = other DNA
cacaccggagtaaaagactttg

SEQ ID NO: 46003 - DNA, 22 bp, synthetic construct
  misc_feature 1..22: note = chemically synthesized
  source 1..22: mol_type = other DNA
tggttttttatctttatgcctg

SEQ ID NO: 46004 - DNA, 22 bp, synthetic construct
  misc_feature 1..22: note = chemically synthesized
  source 1..22: mol_type = other DNA
ggttttttatctttatgcctga

SEQ ID NO: 46005 - DNA, 22 bp, synthetic construct
  misc_feature 1..22: note = chemically synthesized
  source 1..22: mol_type = other DNA
gttttttatctttatgcctgac

SEQ ID NO: 46006 - DNA, 22 bp, synthetic construct
  misc_feature 1..22: note = chemically synthesized
  source 1..22: mol_type = other DNA
tttatctttatgcctgactaaa

SEQ ID NO: 46007 - DNA, 22 bp, synthetic construct
  misc_feature 1..22: note = chemically synthesized
  source 1..22: mol_type = other DNA
ttatctttatgcctgactaaaa

SEQ ID NO: 46008 - DNA, 22 bp, synthetic construct
  misc_feature 1..22: note = chemically synthesized
  source 1..22: mol_type = other DNA
tatctttatgcctgactaaaag

SEQ ID NO: 46009 - DNA, 22 bp, synthetic construct
  misc_feature 1..22: note = chemically synthesized
  source 1..22: mol_type = other DNA
atctttatgcctgactaaaagt

SEQ ID NO: 46010 - DNA, 22 bp, synthetic construct
  misc_feature 1..22: note = chemically synthesized
  source 1..22: mol_type = other DNA
tctttatgcctgactaaaagtt

SEQ ID NO: 46011 - DNA, 22 bp, synthetic construct
  misc_feature 1..22: note = chemically synthesized
  source 1..22: mol_type = other DNA
tatgcctgactaaaagttaact

SEQ ID NO: 46012 - DNA, 22 bp, synthetic construct
  misc_feature 1..22: note = chemically synthesized
  source 1..22: mol_type = other DNA
atgcctgactaaaagttaactc

SEQ ID NO: 46013 - DNA, 22 bp, synthetic construct
  misc_feature 1..22: note = chemically synthesized
  source 1..22: mol_type = other DNA
tgcctgactaaaagttaactct

SEQ ID NO: 46014 - DNA, 22 bp, synthetic construct
  misc_feature 1..22: note = chemically synthesized
  source 1..22: mol_type = other DNA
actaaaagttaactctcattct

SEQ ID NO: 46015 - DNA, 22 bp, synthetic construct
  misc_feature 1..22: note = chemically synthesized
  source 1..22: mol_type = other DNA
aaagttaactctcattctttca

SEQ ID NO: 46016 - DNA, 22 bp, synthetic construct
  misc_feature 1..22: note = chemically synthesized
  source 1..22: mol_type = other DNA
actctcattctttcattcagca

SEQ ID NO: 46017 - DNA, 22 bp, synthetic construct
  misc_feature 1..22: note = chemically synthesized
  source 1..22: mol_type = other DNA
tcattctttcattcagcaaata

SEQ ID NO: 46018 - DNA, 22 bp, synthetic construct
  misc_feature 1..22: note = chemically synthesized
  source 1..22: mol_type = other DNA
attctttcattcagcaaatatt

SEQ ID NO: 46019 - DNA, 22 bp, synthetic construct
  misc_feature 1..22: note = chemically synthesized
  source 1..22: mol_type = other DNA
tttcattcagcaaatattttgt

SEQ ID NO: 46020 - DNA, 22 bp, synthetic construct
  misc_feature 1..22: note = chemically synthesized
  source 1..22: mol_type = other DNA
tcattcagcaaatattttgtgc

SEQ ID NO: 46021 - DNA, 22 bp, synthetic construct
  misc_feature 1..22: note = chemically synthesized
  source 1..22: mol_type = other DNA
cattcagcaaatattttgtgct

SEQ ID NO: 46022 - DNA, 22 bp, synthetic construct
  misc_feature 1..22: note = chemically synthesized
  source 1..22: mol_type = other DNA
attcagcaaatattttgtgcta

SEQ ID NO: 46023 - DNA, 22 bp, synthetic construct
  misc_feature 1..22: note = chemically synthesized
  source 1..22: mol_type = other DNA
agcaaatattttgtgctagtgc

SEQ ID NO: 46024 - DNA, 22 bp, synthetic construct
  misc_feature 1..22: note = chemically synthesized
  source 1..22: mol_type = other DNA
tgtgctagtgcatgacactgca

SEQ ID NO: 46025 - DNA, 22 bp, synthetic construct
  misc_feature 1..22: note = chemically synthesized
  source 1..22: mol_type = other DNA
gtgctagtgcatgacactgcag

SEQ ID NO: 46026 - DNA, 22 bp, synthetic construct
  misc_feature 1..22: note = chemically synthesized
  source 1..22: mol_type = other DNA
tgctagtgcatgacactgcaga

SEQ ID NO: 46027 - DNA, 22 bp, synthetic construct
  misc_feature 1..22: note = chemically synthesized
  source 1..22: mol_type = other DNA
gtgcatgacactgcagattaat

SEQ ID NO: 46028 - DNA, 22 bp, synthetic construct
  misc_feature 1..22: note = chemically synthesized
  source 1..22: mol_type = other DNA
cagattaatatcgtagatgaac

SEQ ID NO: 46029 - DNA, 22 bp, synthetic construct
  misc_feature 1..22: note = chemically synthesized
  source 1..22: mol_type = other DNA
atatcgtagatgaactgagtct

SEQ ID NO: 46030 - DNA, 22 bp, synthetic construct
  misc_feature 1..22: note = chemically synthesized
  source 1..22: mol_type = other DNA
agtctgggctaggtagagtcaa

SEQ ID NO: 46031 - DNA, 22 bp, synthetic construct
  misc_feature 1..22: note = chemically synthesized
  source 1..22: mol_type = other DNA
ggctaggtagagtcaaaaaaaa

SEQ ID NO: 46032 - DNA, 22 bp, synthetic construct
  misc_feature 1..22: note = chemically synthesized
  source 1..22: mol_type = other DNA
ggtagagtcaaaaaaaaatttc

SEQ ID NO: 46033 - DNA, 22 bp, synthetic construct
  misc_feature 1..22: note = chemically synthesized
  source 1..22: mol_type = other DNA
cctaaaggagcctgtacctaaa

SEQ ID NO: 46034 - DNA, 22 bp, synthetic construct
  misc_feature 1..22: note = chemically synthesized
  source 1..22: mol_type = other DNA
ctaaaggagcctgtacctaaac

SEQ ID NO: 46035 - DNA, 22 bp, synthetic construct
  misc_feature 1..22: note = chemically synthesized
  source 1..22: mol_type = other DNA
aaggagcctgtacctaaactga

SEQ ID NO: 46036 - DNA, 22 bp, synthetic construct
  misc_feature 1..22: note = chemically synthesized
  source 1..22: mol_type = other DNA
tacctaaactgagtcttcagag

SEQ ID NO: 46037 - DNA, 22 bp, synthetic construct
  misc_feature 1..22: note = chemically synthesized
  source 1..22: mol_type = other DNA
aactgagtcttcagagagaagt

SEQ ID NO: 46038 - DNA, 22 bp, synthetic construct
  misc_feature 1..22: note = chemically synthesized
  source 1..22: mol_type = other DNA
agtcttcagagagaagttggaa

SEQ ID NO: 46039 - DNA, 22 bp, synthetic construct
  misc_feature 1..22: note = chemically synthesized
  source 1..22: mol_type = other DNA
cagagagaagttggaactggca

SEQ ID NO: 46040 - DNA, 22 bp, synthetic construct
  misc_feature 1..22: note = chemically synthesized
  source 1..22: mol_type = other DNA
agagagaagttggaactggcaa

SEQ ID NO: 46041 - DNA, 22 bp, synthetic construct
  misc_feature 1..22: note = chemically synthesized
  source 1..22: mol_type = other DNA
gaactggcaaagtgaggaagga

SEQ ID NO: 46042 - DNA, 22 bp, synthetic construct
  misc_feature 1..22: note = chemically synthesized
  source 1..22: mol_type = other DNA
gcaaagtgaggaaggacggggt

SEQ ID NO: 46043 - DNA, 22 bp, synthetic construct
  misc_feature 1..22: note = chemically synthesized
  source 1..22: mol_type = other DNA
gagggaagagtgagtgcaaagg

SEQ ID NO: 46044 - DNA, 22 bp, synthetic construct
  misc_feature 1..22: note = chemically synthesized
  source 1..22: mol_type = other DNA
catgctctagaatccaaaactg

SEQ ID NO: 46045 - DNA, 22 bp, synthetic construct
  misc_feature 1..22: note = chemically synthesized
  source 1..22: mol_type = other DNA
tagaatccaaaactgtgtcagc

SEQ ID NO: 46046 - DNA, 22 bp, synthetic construct
  misc_feature 1..22: note = chemically synthesized
  source 1..22: mol_type = other DNA
gaatccaaaactgtgtcagcca

SEQ ID NO: 46047 - DNA, 22 bp, synthetic construct
  misc_feature 1..22: note = chemically synthesized
  source 1..22: mol_type = other DNA
tgtcagccaaatttgagttgat

SEQ ID NO: 46048 - DNA, 22 bp, synthetic construct
  misc_feature 1..22: note = chemically synthesized
  source 1..22: mol_type = other DNA
gagttgatggagggacagccaa

SEQ ID NO: 46049 - DNA, 22 bp, synthetic construct
  misc_feature 1..22: note = chemically synthesized
  source 1..22: mol_type = other DNA
agttgatggagggacagccaaa

SEQ ID NO: 46050 - DNA, 22 bp, synthetic construct
  misc_feature 1..22: note = chemically synthesized
  source 1..22: mol_type = other DNA
atggagggacagccaaactgag

SEQ ID NO: 46051 - DNA, 22 bp, synthetic construct
  misc_feature 1..22: note = chemically synthesized
  source 1..22: mol_type = other DNA
agatacccaggcggtggttgga

SEQ ID NO: 46052 - DNA, 22 bp, synthetic construct
  misc_feature 1..22: note = chemically synthesized
  source 1..22: mol_type = other DNA
gatttatggatctggatttcag

SEQ ID NO: 46053 - DNA, 22 bp, synthetic construct
  misc_feature 1..22: note = chemically synthesized
  source 1..22: mol_type = other DNA
atggatctggatttcaggggag

SEQ ID NO: 46054 - DNA, 22 bp, synthetic construct
  misc_feature 1..22: note = chemically synthesized
  source 1..22: mol_type = other DNA
tggatctggatttcaggggagt

SEQ ID NO: 46055 - DNA, 22 bp, synthetic construct
  misc_feature 1..22: note = chemically synthesized
  source 1..22: mol_type = other DNA
gatttcaggggagtgggcaggg

SEQ ID NO: 46056 - DNA, 22 bp, synthetic construct
  misc_feature 1..22: note = chemically synthesized
  source 1..22: mol_type = other DNA
caggggagtgggcagggctagg

SEQ ID NO: 46057 - DNA, 22 bp, synthetic construct
  misc_feature 1..22: note = chemically synthesized
  source 1..22: mol_type = other DNA
aggggagtgggcagggctaggg

SEQ ID NO: 46058 - DNA, 22 bp, synthetic construct
  misc_feature 1..22: note = chemically synthesized
  source 1..22: mol_type = other DNA
ggggaatagaactgagggtcat

SEQ ID NO: 46059 - DNA, 22 bp, synthetic construct
  misc_feature 1..22: note = chemically synthesized
  source 1..22: mol_type = other DNA
agggtcatgatgtcagtggtag

SEQ ID NO: 46060 - DNA, 22 bp, synthetic construct
  misc_feature 1..22: note = chemically synthesized
  source 1..22: mol_type = other DNA
aagtcttggaagaaagagtaga

SEQ ID NO: 46061 - DNA, 22 bp, synthetic construct
  misc_feature 1..22: note = chemically synthesized
  source 1..22: mol_type = other DNA
ggaagaaagagtagatagaaac

SEQ ID NO: 46062 - DNA, 22 bp, synthetic construct
  misc_feature 1..22: note = chemically synthesized
  source 1..22: mol_type = other DNA
gaagaaagagtagatagaaact

SEQ ID NO: 46063 - DNA, 22 bp, synthetic construct
  misc_feature 1..22: note = chemically synthesized
  source 1..22: mol_type = other DNA
tgttttctgatgaacattctat

SEQ ID NO: 46064 - DNA, 22 bp, synthetic construct
  misc_feature 1..22: note = chemically synthesized
  source 1..22: mol_type = other DNA
gttttctgatgaacattctatg

SEQ ID NO: 46065 - DNA, 22 bp, synthetic construct
  misc_feature 1..22: note = chemically synthesized
  source 1..22: mol_type = other DNA
ttttctgatgaacattctatga

SEQ ID NO: 46066 - DNA, 22 bp, synthetic construct
  misc_feature 1..22: note = chemically synthesized
  source 1..22: mol_type = other DNA
tctgatgaacattctatgagga

SEQ ID NO: 46067 - DNA, 22 bp, synthetic construct
  misc_feature 1..22: note = chemically synthesized
  source 1..22: mol_type = other DNA
ctgatgaacattctatgaggaa

SEQ ID NO: 46068 - DNA, 22 bp, synthetic construct
  misc_feature 1..22: note = chemically synthesized
  source 1..22: mol_type = other DNA
tgatgaacattctatgaggaag

SEQ ID NO: 46069 - DNA, 22 bp, synthetic construct
  misc_feature 1..22: note = chemically synthesized
  source 1..22: mol_type = other DNA
atgaacattctatgaggaagtt

SEQ ID NO: 46070 - DNA, 22 bp, synthetic construct
  misc_feature 1..22: note = chemically synthesized
  source 1..22: mol_type = other DNA
tatgaggaagttcagcagaggt

SEQ ID NO: 46071 - DNA, 22 bp, synthetic construct
  misc_feature 1..22: note = chemically synthesized
  source 1..22: mol_type = other DNA
tgaggaagttcagcagaggttg

SEQ ID NO: 46072 - DNA, 22 bp, synthetic construct
  misc_feature 1..22: note = chemically synthesized
  source 1..22: mol_type = other DNA
agcagaggttggaaacatcttt

SEQ ID NO: 46073 - DNA, 22 bp, synthetic construct
  misc_feature 1..22: note = chemically synthesized
  source 1..22: mol_type = other DNA
gaaacatctttaccatttataa

SEQ ID NO: 46074 - DNA, 22 bp, synthetic construct
  misc_feature 1..22: note = chemically synthesized
  source 1..22: mol_type = other DNA
taccatttataaataaatttta

SEQ ID NO: 46075 - DNA, 22 bp, synthetic construct
  misc_feature 1..22: note = chemically synthesized
  source 1..22: mol_type = other DNA
accatttataaataaattttat

SEQ ID NO: 46076 - DNA, 22 bp, synthetic construct
  misc_feature 1..22: note = chemically synthesized
  source 1..22: mol_type = other DNA
ccatttataaataaattttatg

SEQ ID NO: 46077 - DNA, 22 bp, synthetic construct
  misc_feature 1..22: note = chemically synthesized
  source 1..22: mol_type = other DNA
ataaataaattttatgtaaaat

SEQ ID NO: 46078 - DNA, 22 bp, synthetic construct
  misc_feature 1..22: note = chemically synthesized
  source 1..22: mol_type = other DNA
taaataaattttatgtaaaatc

SEQ ID NO: 46079 - DNA, 22 bp, synthetic construct
  misc_feature 1..22: note = chemically synthesized
  source 1..22: mol_type = other DNA
tatgtaaaatcctatcctgctg

SEQ ID NO: 46080 - DNA, 22 bp, synthetic construct
  misc_feature 1..22: note = chemically synthesized
  source 1..22: mol_type = other DNA
atgtaaaatcctatcctgctgt

SEQ ID NO: 46081 - DNA, 22 bp, synthetic construct
  misc_feature 1..22: note = chemically synthesized
  source 1..22: mol_type = other DNA
tgtaaaatcctatcctgctgtc

SEQ ID NO: 46082 - DNA, 22 bp, synthetic construct
  misc_feature 1..22: note = chemically synthesized
  source 1..22: mol_type = other DNA
tcctgctgtcatgtttaagcaa

SEQ ID NO: 46083 - DNA, 22 bp, synthetic construct
  misc_feature 1..22: note = chemically synthesized
  source 1..22: mol_type = other DNA
ctgtcatgtttaagcaacttat

SEQ ID NO: 46084 - DNA, 22 bp, synthetic construct
  misc_feature 1..22: note = chemically synthesized
  source 1..22: mol_type = other DNA
tcatgtttaagcaacttattat

SEQ ID NO: 46085 - DNA, 22 bp, synthetic construct
  misc_feature 1..22: note = chemically synthesized
  source 1..22: mol_type = other DNA
aagcaacttattatgcacagca

SEQ ID NO: 46086 - DNA, 22 bp, synthetic construct
  misc_feature 1..22: note = chemically synthesized
  source 1..22: mol_type = other DNA
agcaacttattatgcacagcac

SEQ ID NO: 46087 - DNA, 22 bp, synthetic construct
  misc_feature 1..22: note = chemically synthesized
  source 1..22: mol_type = other DNA
attatgcacagcaccaggacat

SEQ ID NO: 46088 - DNA, 22 bp, synthetic construct
  misc_feature 1..22: note = chemically synthesized
  source 1..22: mol_type = other DNA
ttatgcacagcaccaggacatc

SEQ ID NO: 46089 - DNA, 22 bp, synthetic construct
  misc_feature 1..22: note = chemically synthesized
  source 1..22: mol_type = other DNA
tgcacagcaccaggacatcaat

SEQ ID NO: 46090 - DNA, 22 bp, synthetic construct
  misc_feature 1..22: note = chemically synthesized
  source 1..22: mol_type = other DNA
catgccagtctttgctctcagt

SEQ ID NO: 46091 - DNA, 22 bp, synthetic construct
  misc_feature 1..22: note = chemically synthesized
  source 1..22: mol_type = other DNA
tgctctcagtttcaaaggcatt

SEQ ID NO: 46092 - DNA, 22 bp, synthetic construct
  misc_feature 1..22: note = chemically synthesized
  source 1..22: mol_type = other DNA
gctctcagtttcaaaggcattc

SEQ ID NO: 46093 - DNA, 22 bp, synthetic construct
  misc_feature 1..22: note = chemically synthesized
  source 1..22: mol_type = other DNA
ctctcagtttcaaaggcattct

SEQ ID NO: 46094 - DNA, 22 bp, synthetic construct
  misc_feature 1..22: note = chemically synthesized
  source 1..22: mol_type = other DNA
tcagtttcaaaggcattcttcc

SEQ ID NO: 46095 - DNA, 22 bp, synthetic construct
  misc_feature 1..22: note = chemically synthesized
  source 1..22: mol_type = other DNA
agtttcaaaggcattcttccct

SEQ ID NO: 46096 - DNA, 22 bp, synthetic construct
  misc_feature 1..22: note = chemically synthesized
  source 1..22: mol_type = other DNA
caaaggcattcttccctgcctg

SEQ ID NO: 46097 - DNA, 22 bp, synthetic construct
  misc_feature 1..22: note = chemically synthesized
  source 1..22: mol_type = other DNA
aaaggcattcttccctgcctgc

SEQ ID NO: 46098 - DNA, 22 bp, synthetic construct
  misc_feature 1..22: note = chemically synthesized
  source 1..22: mol_type = other DNA
ttccctgcctgctgtctaatct

SEQ ID NO: 46099 - DNA, 22 bp, synthetic construct
  misc_feature 1..22: note = chemically synthesized
  source 1..22: mol_type = other DNA
ccctgcctgctgtctaatcttt

SEQ ID NO: 46100 - DNA, 22 bp, synthetic construct
  misc_feature 1..22: note = chemically synthesized
  source 1..22: mol_type = other DNA
cctgcctgctgtctaatcttta

SEQ ID NO: 46101 - DNA, 22 bp, synthetic construct
  misc_feature 1..22: note = chemically synthesized
  source 1..22: mol_type = other DNA
cctgctgtctaatctttacaaa

SEQ ID NO: 46102 - DNA, 22 bp, synthetic construct
  misc_feature 1..22: note = chemically synthesized
  source 1..22: mol_type = other DNA
ctgtctaatctttacaaagaaa

SEQ ID NO: 46103 - DNA, 22 bp, synthetic construct
  misc_feature 1..22: note = chemically synthesized
  source 1..22: mol_type = other DNA
tctaatctttacaaagaaaggt

SEQ ID NO: 46104 - DNA, 22 bp, synthetic construct
  misc_feature 1..22: note = chemically synthesized
  source 1..22: mol_type = other DNA
atctttacaaagaaaggttaac

SEQ ID NO: 46105 - DNA, 22 bp, synthetic construct
  misc_feature 1..22: note = chemically synthesized
  source 1..22: mol_type = other DNA
tacaaagaaaggttaactccag

SEQ ID NO: 46106 - DNA, 22 bp, synthetic construct
  misc_feature 1..22: note = chemically synthesized
  source 1..22: mol_type = other DNA
acaaagaaaggttaactccaga

SEQ ID NO: 46107 - DNA, 22 bp, synthetic construct
  misc_feature 1..22: note = chemically synthesized
  source 1..22: mol_type = other DNA
caaagaaaggttaactccagag

SEQ ID NO: 46108 - DNA, 22 bp, synthetic construct
  misc_feature 1..22: note = chemically synthesized
  source 1..22: mol_type = other DNA
actccagaggtcaggaatctga

SEQ ID NO: 46109 - DNA, 22 bp, synthetic construct
  misc_feature 1..22: note = chemically synthesized
  source 1..22: mol_type = other DNA
cagaggtcaggaatctgaacac

SEQ ID NO: 46110 - DNA, 22 bp, synthetic construct
  misc_feature 1..22: note = chemically synthesized
  source 1..22: mol_type = other DNA
aacacagaaaaccagattgcat

SEQ ID NO: 46111 - DNA, 22 bp, synthetic construct
  misc_feature 1..22: note = chemically synthesized
  source 1..22: mol_type = other DNA
catcatattcattctaatcaat

SEQ ID NO: 46112 - DNA, 22 bp, synthetic construct
  misc_feature 1..22: note = chemically synthesized
  source 1..22: mol_type = other DNA
attctaatcaataaacattata

SEQ ID NO: 46113 - DNA, 22 bp, synthetic construct
  misc_feature 1..22: note = chemically synthesized
  source 1..22: mol_type = other DNA
taatcaataaacattatataat

SEQ ID NO: 46114 - DNA, 22 bp, synthetic construct
  misc_feature 1..22: note = chemically synthesized
  source 1..22: mol_type = other DNA
atcaataaacattatataattt

SEQ ID NO: 46115 - DNA, 22 bp, synthetic construct
  misc_feature 1..22: note = chemically synthesized
  source 1..22: mol_type = other DNA
tataatttttaaaactgtttct

SEQ ID NO: 46116 - DNA, 22 bp, synthetic construct
  misc_feature 1..22: note = chemically synthesized
  source 1..22: mol_type = other DNA
ttaaaactgtttctcatctttt

SEQ ID NO: 46117 - DNA, 22 bp, synthetic construct
  misc_feature 1..22: note = chemically synthesized
  source 1..22: mol_type = other DNA
taaaactgtttctcatctttta

SEQ ID NO: 46118 - DNA, 22 bp, synthetic construct
  misc_feature 1..22: note = chemically synthesized
  source 1..22: mol_type = other DNA
aaaactgtttctcatcttttat

SEQ ID NO: 46119 - DNA, 22 bp, synthetic construct
  misc_feature 1..22: note = chemically synthesized
  source 1..22: mol_type = other DNA
aaactgtttctcatcttttatt

SEQ ID NO: 46120 - DNA, 22 bp, synthetic construct
  misc_feature 1..22: note = chemically synthesized
  source 1..22: mol_type = other DNA
tttctcatcttttatttcttca

SEQ ID NO: 46121 - DNA, 22 bp, synthetic construct
  misc_feature 1..22: note = chemically synthesized
  source 1..22: mol_type = other DNA
ctcatcttttatttcttcattt

SEQ ID NO: 46122 - DNA, 22 bp, synthetic construct
  misc_feature 1..22: note = chemically synthesized
  source 1..22: mol_type = other DNA
tcatcttttatttcttcatttt

SEQ ID NO: 46123 - DNA, 22 bp, synthetic construct
  misc_feature 1..22: note = chemically synthesized
  source 1..22: mol_type = other DNA
atcttttatttcttcattttaa

SEQ ID NO: 46124 - DNA, 22 bp, synthetic construct
  misc_feature 1..22: note = chemically synthesized
  source 1..22: mol_type = other DNA
ttatttcttcattttaatgaat

SEQ ID NO: 46125 - DNA, 22 bp, synthetic construct
  misc_feature 1..22: note = chemically synthesized
  source 1..22: mol_type = other DNA
tatttcttcattttaatgaata

SEQ ID NO: 46126 - DNA, 22 bp, synthetic construct
  misc_feature 1..22: note = chemically synthesized
  source 1..22: mol_type = other DNA
atttcttcattttaatgaatat

SEQ ID NO: 46127 - DNA, 22 bp, synthetic construct
  misc_feature 1..22: note = chemically synthesized
  source 1..22: mol_type = other DNA
tttcttcattttaatgaatatg

SEQ ID NO: 46128 - DNA, 22 bp, synthetic construct
  misc_feature 1..22: note = chemically synthesized
  source 1..22: mol_type = other DNA
cttcattttaatgaatatgtca

SEQ ID NO: 46129 - DNA, 22 bp, synthetic construct
  misc_feature 1..22: note = chemically synthesized
  source 1..22: mol_type = other DNA
ttcattttaatgaatatgtcaa

SEQ ID NO: 46130 - DNA, 22 bp, synthetic construct
  misc_feature 1..22: note = chemically synthesized
  source 1..22: mol_type = other DNA
cattttaatgaatatgtcaaca

SEQ ID NO: 46131 - DNA, 22 bp, synthetic construct
  misc_feature 1..22: note = chemically synthesized
  source 1..22: mol_type = other DNA
attttaatgaatatgtcaacac

SEQ ID NO: 46132 - DNA, 22 bp, synthetic construct
  misc_feature 1..22: note = chemically synthesized
  source 1..22: mol_type = other DNA
taatgaatatgtcaacacaaag

SEQ ID NO: 46133 - DNA, 22 bp, synthetic construct
  misc_feature 1..22: note = chemically synthesized
  source 1..22: mol_type = other DNA
aatgaatatgtcaacacaaagc

SEQ ID NO: 46134 - DNA, 22 bp, synthetic construct
  misc_feature 1..22: note = chemically synthesized
  source 1..22: mol_type = other DNA
atgaatatgtcaacacaaagcc

SEQ ID NO: 46135 - DNA, 22 bp, synthetic construct
  misc_feature 1..22: note = chemically synthesized
  source 1..22: mol_type = other DNA
acacaaaagtacaactggggta

SEQ ID NO: 46136 - DNA, 22 bp, synthetic construct
  misc_feature 1..22: note = chemically synthesized
  source 1..22: mol_type = other DNA
cacaaaagtacaactggggtaa

SEQ ID NO: 46137 - DNA, 22 bp, synthetic construct
  misc_feature 1..22: note = chemically synthesized
  source 1..22: mol_type = other DNA
gggtaagaaaattcaaaagata

SEQ ID NO: 46138 - DNA, 22 bp, synthetic construct
  misc_feature 1..22: note = chemically synthesized
  source 1..22: mol_type = other DNA
aaaagataaagtaataaaatta

SEQ ID NO: 46139 - DNA, 22 bp, synthetic construct
  misc_feature 1..22: note = chemically synthesized
  source 1..22: mol_type = other DNA
aatttaaaatgaaataccctat

SEQ ID NO: 46140 - DNA, 22 bp, synthetic construct
  misc_feature 1..22: note = chemically synthesized
  source 1..22: mol_type = other DNA
aaaatgaaataccctatgtatt

SEQ ID NO: 46141 - DNA, 22 bp, synthetic construct
  misc_feature 1..22: note = chemically synthesized
  source 1..22: mol_type = other DNA
aaatgaaataccctatgtattt

SEQ ID NO: 46142 - DNA, 22 bp, synthetic construct
  misc_feature 1..22: note = chemically synthesized
  source 1..22: mol_type = other DNA
tgtatttgagtaagttgcttag

SEQ ID NO: 46143 - DNA, 22 bp, synthetic construct
  misc_feature 1..22: note = chemically synthesized
  source 1..22: mol_type = other DNA
gagtaagttgcttagcttctcc

SEQ ID NO: 46144 - DNA, 22 bp, synthetic construct
  misc_feature 1..22: note = chemically synthesized
  source 1..22: mol_type = other DNA
agtaagttgcttagcttctccc

SEQ ID NO: 46145 - DNA, 22 bp, synthetic construct
  misc_feature 1..22: note = chemically synthesized
  source 1..22: mol_type = other DNA
cttagcttctcccaaccttggt

SEQ ID NO: 46146 - DNA, 22 bp, synthetic construct
  misc_feature 1..22: note = chemically synthesized
  source 1..22: mol_type = other DNA
agcttctcccaaccttggtttc

SEQ ID NO: 46147 - DNA, 22 bp, synthetic construct
  misc_feature 1..22: note = chemically synthesized
  source 1..22: mol_type = other DNA
gcttctcccaaccttggtttcc

SEQ ID NO: 46148 - DNA, 22 bp, synthetic construct
  misc_feature 1..22: note = chemically synthesized
  source 1..22: mol_type = other DNA
ctcccaaccttggtttcctcat

SEQ ID NO: 46149 - DNA, 22 bp, synthetic construct
  misc_feature 1..22: note = chemically synthesized
  source 1..22: mol_type = other DNA
tcccaaccttggtttcctcatt

SEQ ID NO: 46150 - DNA, 22 bp, synthetic construct
  misc_feature 1..22: note = chemically synthesized
  source 1..22: mol_type = other DNA
ccaaccttggtttcctcatttc

SEQ ID NO: 46151 - DNA, 22 bp, synthetic construct
  misc_feature 1..22: note = chemically synthesized
  source 1..22: mol_type = other DNA
ggtttcctcatttctaaaacga

SEQ ID NO: 46152 - DNA, 22 bp, synthetic construct
  misc_feature 1..22: note = chemically synthesized
  source 1..22: mol_type = other DNA
gtttcctcatttctaaaacgaa

SEQ ID NO: 46153 - DNA, 22 bp, synthetic construct
  misc_feature 1..22: note = chemically synthesized
  source 1..22: mol_type = other DNA
cctcatttctaaaacgaagaac

SEQ ID NO: 46154 - DNA, 22 bp, synthetic construct
  misc_feature 1..22: note = chemically synthesized
  source 1..22: mol_type = other DNA
ctcatttctaaaacgaagaact

SEQ ID NO: 46155 - DNA, 22 bp, synthetic construct
  misc_feature 1..22: note = chemically synthesized
  source 1..22: mol_type = other DNA
atttctaaaacgaagaacttgc

SEQ ID NO: 46156 - DNA, 22 bp, synthetic construct
  misc_feature 1..22: note = chemically synthesized
  source 1..22: mol_type = other DNA
ctaaaacgaagaacttgcttaa

SEQ ID NO: 46157 - DNA, 22 bp, synthetic construct
  misc_feature 1..22: note = chemically synthesized
  source 1..22: mol_type = other DNA
taaaacgaagaacttgcttaat

SEQ ID NO: 46158 - DNA, 22 bp, synthetic construct
  misc_feature 1..22: note = chemically synthesized
  source 1..22: mol_type = other DNA
aaacgaagaacttgcttaatat

SEQ ID NO: 46159 - DNA, 22 bp, synthetic construct
  misc_feature 1..22: note = chemically synthesized
  source 1..22: mol_type = other DNA
gcttaatattcaggctctgggc

SEQ ID NO: 46160 - DNA, 22 bp, synthetic construct
  misc_feature 1..22: note = chemically synthesized
  source 1..22: mol_type = other DNA
cttaatattcaggctctgggcc

SEQ ID NO: 46161 - DNA, 22 bp, synthetic construct
  misc_feature 1..22: note = chemically synthesized
  source 1..22: mol_type = other DNA
aatattcaggctctgggcccca

SEQ ID NO: 46162 - DNA, 22 bp, synthetic construct
  misc_feature 1..22: note = chemically synthesized
  source 1..22: mol_type = other DNA
atattcaggctctgggccccac

SEQ ID NO: 46163 - DNA, 22 bp, synthetic construct
  misc_feature 1..22: note = chemically synthesized
  source 1..22: mol_type = other DNA
aggctctgggccccaccaccaa

SEQ ID NO: 46164 - DNA, 22 bp, synthetic construct
  misc_feature 1..22: note = chemically synthesized
  source 1..22: mol_type = other DNA
tgggccccaccaccaaatcctt

SEQ ID NO: 46165 - DNA, 22 bp, synthetic construct
  misc_feature 1..22: note = chemically synthesized
  source 1..22: mol_type = other DNA
ggccccaccaccaaatccttga

SEQ ID NO: 46166 - DNA, 22 bp, synthetic construct
  misc_feature 1..22: note = chemically synthesized
  source 1..22: mol_type = other DNA
gattcactggctctgggtctgt

SEQ ID NO: 46167 - DNA, 22 bp, synthetic construct
  misc_feature 1..22: note = chemically synthesized
  source 1..22: mol_type = other DNA
attcactggctctgggtctgta

SEQ ID NO: 46168 - DNA, 22 bp, synthetic construct
  misc_feature 1..22: note = chemically synthesized
  source 1..22: mol_type = other DNA
actggctctgggtctgtatgta

SEQ ID NO: 46169 - DNA, 22 bp, synthetic construct
  misc_feature 1..22: note = chemically synthesized
  source 1..22: mol_type = other DNA
gctctgggtctgtatgtaacaa

SEQ ID NO: 46170 - DNA, 22 bp, synthetic construct
  misc_feature 1..22: note = chemically synthesized
  source 1..22: mol_type = other DNA
tgggtctgtatgtaacaagctt

SEQ ID NO: 46171 - DNA, 22 bp, synthetic construct
  misc_feature 1..22: note = chemically synthesized
  source 1..22: mol_type = other DNA
ggtctgtatgtaacaagcttct

SEQ ID NO: 46172 - DNA, 22 bp, synthetic construct
  misc_feature 1..22: note = chemically synthesized
  source 1..22: mol_type = other DNA
tatgtaacaagcttctggagtg

SEQ ID NO: 46173 - DNA, 22 bp, synthetic construct
  misc_feature 1..22: note = chemically synthesized
  source 1..22: mol_type = other DNA
ctggagtgattctaatgattag

SEQ ID NO: 46174 - DNA, 22 bp, synthetic construct
  misc_feature 1..22: note = chemically synthesized
  source 1..22: mol_type = other DNA
tggagtgattctaatgattagc

SEQ ID NO: 46175 - DNA, 22 bp, synthetic construct
  misc_feature 1..22: note = chemically synthesized
  source 1..22: mol_type = other DNA
gagtgattctaatgattagcca

SEQ ID NO: 46176 - DNA, 22 bp, synthetic construct
  misc_feature 1..22: note = chemically synthesized
  source 1..22: mol_type = other DNA
taatgattagccagagacagga

SEQ ID NO: 46177 - DNA, 22 bp, synthetic construct
  misc_feature 1..22: note = chemically synthesized
  source 1..22: mol_type = other DNA
atgattagccagagacaggacc

SEQ ID NO: 46178 - DNA, 22 bp, synthetic construct
  misc_feature 1..22: note = chemically synthesized
  source 1..22: mol_type = other DNA
gccagagacaggacctactatt

SEQ ID NO: 46179 - DNA, 22 bp, synthetic construct
  misc_feature 1..22: note = chemically synthesized
  source 1..22: mol_type = other DNA
ctattctacgtaactgatttcc

SEQ ID NO: 46180 - DNA, 22 bp, synthetic construct
  misc_feature 1..22: note = chemically synthesized
  source 1..22: mol_type = other DNA
ttctacgtaactgatttcctct

SEQ ID NO: 46181 - DNA, 22 bp, synthetic construct
  misc_feature 1..22: note = chemically synthesized
  source 1..22: mol_type = other DNA
tacgtaactgatttcctcttgc

SEQ ID NO: 46182 - DNA, 22 bp, synthetic construct
  misc_feature 1..22: note = chemically synthesized
  source 1..22: mol_type = other DNA
cgtaactgatttcctcttgctg

SEQ ID NO: 46183 - DNA, 22 bp, synthetic construct
  misc_feature 1..22: note = chemically synthesized
  source 1..22: mol_type = other DNA
atttcctcttgctgctgtaaaa

SEQ ID NO: 46184 - DNA, 22 bp, synthetic construct
  misc_feature 1..22: note = chemically synthesized
  source 1..22: mol_type = other DNA
cctcttgctgctgtaaaaaatt

SEQ ID NO: 46185 - DNA, 22 bp, synthetic construct
  misc_feature 1..22: note = chemically synthesized
  source 1..22: mol_type = other DNA
ctcttgctgctgtaaaaaatta

SEQ ID NO: 46186 - DNA, 22 bp, synthetic construct
  misc_feature 1..22: note = chemically synthesized
  source 1..22: mol_type = other DNA
ttgctgctgtaaaaaattacca

SEQ ID NO: 46187 - DNA, 22 bp, synthetic construct
  misc_feature 1..22: note = chemically synthesized
  source 1..22: mol_type = other DNA
gctgctgtaaaaaattaccaca

SEQ ID NO: 46188 - DNA, 22 bp, synthetic construct
  misc_feature 1..22: note = chemically synthesized
  source 1..22: mol_type = other DNA
ctgctgtaaaaaattaccacaa

SEQ ID NO: 46189 - DNA, 22 bp, synthetic construct
  misc_feature 1..22: note = chemically synthesized
  source 1..22: mol_type = other DNA
ctgtaaaaaattaccacaaatt

SEQ ID NO: 46190 - DNA, 22 bp, synthetic construct
  misc_feature 1..22: note = chemically synthesized
  source 1..22: mol_type = other DNA
taaaaaattaccacaaatttat

SEQ ID NO: 46191 - DNA, 22 bp, synthetic construct
  misc_feature 1..22: note = chemically synthesized
  source 1..22: mol_type = other DNA
ccacaaatttattggcttaaaa

SEQ ID NO: 46192 - DNA, 22 bp, synthetic construct
  misc_feature 1..22: note = chemically synthesized
  source 1..22: mol_type = other DNA
attggcttaaaacaacacaaat

SEQ ID NO: 46193 - DNA, 22 bp, synthetic construct
  misc_feature 1..22: note = chemically synthesized
  source 1..22: mol_type = other DNA
ttggcttaaaacaacacaaatg

SEQ ID NO: 46194 - DNA, 22 bp, synthetic construct
  misc_feature 1..22: note = chemically synthesized
  source 1..22: mol_type = other DNA
gcttaaaacaacacaaatgtat

SEQ ID NO: 46195 - DNA, 22 bp, synthetic construct
  misc_feature 1..22: note = chemically synthesized
  source 1..22: mol_type = other DNA
aaaacaacacaaatgtattatc

SEQ ID NO: 46196 - DNA, 22 bp, synthetic construct
  misc_feature 1..22: note = chemically synthesized
  source 1..22: mol_type = other DNA
aaacaacacaaatgtattatct

SEQ ID NO: 46197 - DNA, 22 bp, synthetic construct
  misc_feature 1..22: note = chemically synthesized
  source 1..22: mol_type = other DNA
tcttgaagttgtggaggtcaga

SEQ ID NO: 46198 - DNA, 22 bp, synthetic construct
  misc_feature 1..22: note = chemically synthesized
  source 1..22: mol_type = other DNA
gaagttgtggaggtcagaagtc

SEQ ID NO: 46199 - DNA, 22 bp, synthetic construct
  misc_feature 1..22: note = chemically synthesized
  source 1..22: mol_type = other DNA
aagttgtggaggtcagaagtct

SEQ ID NO: 46200 - DNA, 22 bp, synthetic construct
  misc_feature 1..22: note = chemically synthesized
  source 1..22: mol_type = other DNA
tggaggtcagaagtctgaaatc

SEQ ID NO: 46201 - DNA, 22 bp, synthetic construct
  misc_feature 1..22: note = chemically synthesized
  source 1..22: mol_type = other DNA
aaatcggtttcactgggctaaa

SEQ ID NO: 46202 - DNA, 22 bp, synthetic construct
  misc_feature 1..22: note = chemically synthesized
  source 1..22: mol_type = other DNA
cactgggctaaagtcgaggtgt

SEQ ID NO: 46203 - DNA, 22 bp, synthetic construct
  misc_feature 1..22: note = chemically synthesized
  source 1..22: mol_type = other DNA
actgggctaaagtcgaggtgtc

SEQ ID NO: 46204 - DNA, 22 bp, synthetic construct
  misc_feature 1..22: note = chemically synthesized
  source 1..22: mol_type = other DNA
ggctaaagtcgaggtgtcagtg

SEQ ID NO: 46205 - DNA, 22 bp, synthetic construct
  misc_feature 1..22: note = chemically synthesized
  source 1..22: mol_type = other DNA
aagtcgaggtgtcagtgtggct

SEQ ID NO: 46206 - DNA, 22 bp, synthetic construct
  misc_feature 1..22: note = chemically synthesized
  source 1..22: mol_type = other DNA
tttcttctggagactctatgag

SEQ ID NO: 46207 - DNA, 22 bp, synthetic construct
  misc_feature 1..22: note = chemically synthesized
  source 1..22: mol_type = other DNA
cttctggagactctatgagaga

SEQ ID NO: 46208 - DNA, 22 bp, synthetic construct
  misc_feature 1..22: note = chemically synthesized
  source 1..22: mol_type = other DNA
ttctggagactctatgagagat

SEQ ID NO: 46209 - DNA, 22 bp, synthetic construct
  misc_feature 1..22: note = chemically synthesized
  source 1..22: mol_type = other DNA
ctggagactctatgagagattg

SEQ ID NO: 46210 - DNA, 22 bp, synthetic construct
  misc_feature 1..22: note = chemically synthesized
  source 1..22: mol_type = other DNA
tggagactctatgagagattgt

SEQ ID NO: 46211 - DNA, 22 bp, synthetic construct
  misc_feature 1..22: note = chemically synthesized
  source 1..22: mol_type = other DNA
gagactctatgagagattgtgt

SEQ ID NO: 46212 - DNA, 22 bp, synthetic construct
  misc_feature 1..22: note = chemically synthesized
  source 1..22: mol_type = other DNA
tatgagagattgtgttttcctg

SEQ ID NO: 46213 - DNA, 22 bp, synthetic construct
  misc_feature 1..22: note = chemically synthesized
  source 1..22: mol_type = other DNA
tgagagattgtgttttcctgcc

SEQ ID NO: 46214 - DNA, 22 bp, synthetic construct
  misc_feature 1..22: note = chemically synthesized
  source 1..22: mol_type = other DNA
tgttttcctgccttttccatgg

SEQ ID NO: 46215 - DNA, 22 bp, synthetic construct
  misc_feature 1..22: note = chemically synthesized
  source 1..22: mol_type = other DNA
tcctgccttttccatggattct

SEQ ID NO: 46216 - DNA, 22 bp, synthetic construct
  misc_feature 1..22: note = chemically synthesized
  source 1..22: mol_type = other DNA
cctgccttttccatggattctg

SEQ ID NO: 46217 - DNA, 22 bp, synthetic construct
  misc_feature 1..22: note = chemically synthesized
  source 1..22: mol_type = other DNA
ctgccttttccatggattctgt

SEQ ID NO: 46218 - DNA, 22 bp, synthetic construct
  misc_feature 1..22: note = chemically synthesized
  source 1..22: mol_type = other DNA
ccttttccatggattctgtttc

SEQ ID NO: 46219 - DNA, 22 bp, synthetic construct
  misc_feature 1..22: note = chemically synthesized
  source 1..22: mol_type = other DNA
ttccatggattctgtttcctct

SEQ ID NO: 46220 - DNA, 22 bp, synthetic construct
  misc_feature 1..22: note = chemically synthesized
  source 1..22: mol_type = other DNA
tccatggattctgtttcctctt

SEQ ID NO: 46221 - DNA, 22 bp, synthetic construct
  misc_feature 1..22: note = chemically synthesized
  source 1..22: mol_type = other DNA
ccatggattctgtttcctcttc

SEQ ID NO: 46222 - DNA, 22 bp, synthetic construct
  misc_feature 1..22: note = chemically synthesized
  source 1..22: mol_type = other DNA
catggattctgtttcctcttct

SEQ ID NO: 46223 - DNA, 22 bp, synthetic construct
  misc_feature 1..22: note = chemically synthesized
  source 1..22: mol_type = other DNA
tgtttcctcttctagaggctac

SEQ ID NO: 46224 - DNA, 22 bp, synthetic construct
  misc_feature 1..22: note = chemically synthesized
  source 1..22: mol_type = other DNA
tttcctcttctagaggctaccc

SEQ ID NO: 46225 - DNA, 22 bp, synthetic construct
  misc_feature 1..22: note = chemically synthesized
  source 1..22: mol_type = other DNA
cctcttctagaggctacccaca

SEQ ID NO: 46226 - DNA, 22 bp, synthetic construct
  misc_feature 1..22: note = chemically synthesized
  source 1..22: mol_type = other DNA
ctcttctagaggctacccacat

SEQ ID NO: 46227 - DNA, 22 bp, synthetic construct
  misc_feature 1..22: note = chemically synthesized
  source 1..22: mol_type = other DNA
ttctagaggctacccacattcc

SEQ ID NO: 46228 - DNA, 22 bp, synthetic construct
  misc_feature 1..22: note = chemically synthesized
  source 1..22: mol_type = other DNA
ctagaggctacccacattcctt

SEQ ID NO: 46229 - DNA, 22 bp, synthetic construct
  misc_feature 1..22: note = chemically synthesized
  source 1..22: mol_type = other DNA
tagaggctacccacattccttg

SEQ ID NO: 46230 - DNA, 22 bp, synthetic construct
  misc_feature 1..22: note = chemically synthesized
  source 1..22: mol_type = other DNA
gaggctacccacattccttggt

SEQ ID NO: 46231 - DNA, 22 bp, synthetic construct
  misc_feature 1..22: note = chemically synthesized
  source 1..22: mol_type = other DNA
cccacattccttggtttgtagc

SEQ ID NO: 46232 - DNA, 22 bp, synthetic construct
  misc_feature 1..22: note = chemically synthesized
  source 1..22: mol_type = other DNA
cttggtttgtagcctcttcctc

SEQ ID NO: 46233 - DNA, 22 bp, synthetic construct
  misc_feature 1..22: note = chemically synthesized
  source 1..22: mol_type = other DNA
ggtttgtagcctcttcctcgat

SEQ ID NO: 46234 - DNA, 22 bp, synthetic construct
  misc_feature 1..22: note = chemically synthesized
  source 1..22: mol_type = other DNA
gtttgtagcctcttcctcgatc

SEQ ID NO: 46235 - DNA, 22 bp, synthetic construct
  misc_feature 1..22: note = chemically synthesized
  source 1..22: mol_type = other DNA
gtagcctcttcctcgatcttca

SEQ ID NO: 46236 - DNA, 22 bp, synthetic construct
  misc_feature 1..22: note = chemically synthesized
  source 1..22: mol_type = other DNA
tagcctcttcctcgatcttcaa

SEQ ID NO: 46237 - DNA, 22 bp, synthetic construct
  misc_feature 1..22: note = chemically synthesized
  source 1..22: mol_type = other DNA
ttcctcgatcttcaaaaaaatg

SEQ ID NO: 46238 - DNA, 22 bp, synthetic construct
  misc_feature 1..22: note = chemically synthesized
  source 1..22: mol_type = other DNA
cctcgatcttcaaaaaaatgta

SEQ ID NO: 46239 - DNA, 22 bp, synthetic construct
  misc_feature 1..22: note = chemically synthesized
  source 1..22: mol_type = other DNA
ctcgatcttcaaaaaaatgtat

SEQ ID NO: 46240 - DNA, 22 bp, synthetic construct
  misc_feature 1..22: note = chemically synthesized
  source 1..22: mol_type = other DNA
gatcttcaaaaaaatgtatctc

SEQ ID NO: 46241 - DNA, 22 bp, synthetic construct
  misc_feature 1..22: note = chemically synthesized
  source 1..22: mol_type = other DNA
caaaaaaatgtatctctgcttt

SEQ ID NO: 46242 - DNA, 22 bp, synthetic construct
  misc_feature 1..22: note = chemically synthesized
  source 1..22: mol_type = other DNA
aaaaaaatgtatctctgctttt

SEQ ID NO: 46243 - DNA, 22 bp, synthetic construct
  misc_feature 1..22: note = chemically synthesized
  source 1..22: mol_type = other DNA
tgcttttgtaatcacgtcacat

SEQ ID NO: 46244 - DNA, 22 bp, synthetic construct
  misc_feature 1..22: note = chemically synthesized
  source 1..22: mol_type = other DNA
cttttgtaatcacgtcacattt

SEQ ID NO: 46245 - DNA, 22 bp, synthetic construct
  misc_feature 1..22: note = chemically synthesized
  source 1..22: mol_type = other DNA
ttgtaatcacgtcacattttct

SEQ ID NO: 46246 - DNA, 22 bp, synthetic construct
  misc_feature 1..22: note = chemically synthesized
  source 1..22: mol_type = other DNA
tgtaatcacgtcacattttctc

SEQ ID NO: 46247 - DNA, 22 bp, synthetic construct
  misc_feature 1..22: note = chemically synthesized
  source 1..22: mol_type = other DNA
gtaatcacgtcacattttctcc

SEQ ID NO: 46248 - DNA, 22 bp, synthetic construct
  misc_feature 1..22: note = chemically synthesized
  source 1..22: mol_type = other DNA
taatcacgtcacattttctcct

SEQ ID NO: 46249 - DNA, 22 bp, synthetic construct
  misc_feature 1..22: note = chemically synthesized
  source 1..22: mol_type = other DNA
tctcctcttataagtcaaatct

SEQ ID NO: 46250 - DNA, 22 bp, synthetic construct
  misc_feature 1..22: note = chemically synthesized
  source 1..22: mol_type = other DNA
ctcctcttataagtcaaatctc

SEQ ID NO: 46251 - DNA, 22 bp, synthetic construct
  misc_feature 1..22: note = chemically synthesized
  source 1..22: mol_type = other DNA
tcctcttataagtcaaatctcc

SEQ ID NO: 46252 - DNA, 22 bp, synthetic construct
  misc_feature 1..22: note = chemically synthesized
  source 1..22: mol_type = other DNA
ctcttataagtcaaatctccct

SEQ ID NO: 46253 - DNA, 22 bp, synthetic construct
  misc_feature 1..22: note = chemically synthesized
  source 1..22: mol_type = other DNA
ttataagtcaaatctccctttg

SEQ ID NO: 46254 - DNA, 22 bp, synthetic construct
  misc_feature 1..22: note = chemically synthesized
  source 1..22: mol_type = other DNA
ataagtcaaatctccctttgcc

SEQ ID NO: 46255 - DNA, 22 bp, synthetic construct
  misc_feature 1..22: note = chemically synthesized
  source 1..22: mol_type = other DNA
taagtcaaatctccctttgcct

SEQ ID NO: 46256 - DNA, 22 bp, synthetic construct
  misc_feature 1..22: note = chemically synthesized
  source 1..22: mol_type = other DNA
cctttgcctccctcttataatg

SEQ ID NO: 46257 - DNA, 22 bp, synthetic construct
  misc_feature 1..22: note = chemically synthesized
  source 1..22: mol_type = other DNA
tgcctccctcttataatgacac

SEQ ID NO: 46258 - DNA, 22 bp, synthetic construct
  misc_feature 1..22: note = chemically synthesized
  source 1..22: mol_type = other DNA
gcctccctcttataatgacact

SEQ ID NO: 46259 - DNA, 22 bp, synthetic construct
  misc_feature 1..22: note = chemically synthesized
  source 1..22: mol_type = other DNA
cctccctcttataatgacactt

SEQ ID NO: 46260 - DNA, 22 bp, synthetic construct
  misc_feature 1..22: note = chemically synthesized
  source 1..22: mol_type = other DNA
cctcttataatgacacttgtga

SEQ ID NO: 46261 - DNA, 22 bp, synthetic construct
  misc_feature 1..22: note = chemically synthesized
  source 1..22: mol_type = other DNA
ttataatgacacttgtgattac

SEQ ID NO: 46262 - DNA, 22 bp, synthetic construct
  misc_feature 1..22: note = chemically synthesized
  source 1..22: mol_type = other DNA
ataatgacacttgtgattacat

SEQ ID NO: 46263 - DNA, 22 bp, synthetic construct
  misc_feature 1..22: note = chemically synthesized
  source 1..22: mol_type = other DNA
taatgacacttgtgattacatt

SEQ ID NO: 46264 - DNA, 22 bp, synthetic construct
  misc_feature 1..22: note = chemically synthesized
  source 1..22: mol_type = other DNA
gtgattacatttaggatacacc

SEQ ID NO: 46265 - DNA, 22 bp, synthetic construct
  misc_feature 1..22: note = chemically synthesized
  source 1..22: mol_type = other DNA
tgattacatttaggatacaccc

SEQ ID NO: 46266 - DNA, 22 bp, synthetic construct
  misc_feature 1..22: note = chemically synthesized
  source 1..22: mol_type = other DNA
catttaggatacacccaaataa

SEQ ID NO: 46267 - DNA, 22 bp, synthetic construct
  misc_feature 1..22: note = chemically synthesized
  source 1..22: mol_type = other DNA
aggatacacccaaataattagg

SEQ ID NO: 46268 - DNA, 22 bp, synthetic construct
  misc_feature 1..22: note = chemically synthesized
  source 1..22: mol_type = other DNA
ggatacacccaaataattagga

SEQ ID NO: 46269 - DNA, 22 bp, synthetic construct
  misc_feature 1..22: note = chemically synthesized
  source 1..22: mol_type = other DNA
ggatatctccccatcccaagat

SEQ ID NO: 46270 - DNA, 22 bp, synthetic construct
  misc_feature 1..22: note = chemically synthesized
  source 1..22: mol_type = other DNA
cccatcccaagatccttaatta

SEQ ID NO: 46271 - DNA, 22 bp, synthetic construct
  misc_feature 1..22: note = chemically synthesized
  source 1..22: mol_type = other DNA
aattatatatgcaaaagtctgt

SEQ ID NO: 46272 - DNA, 22 bp, synthetic construct
  misc_feature 1..22: note = chemically synthesized
  source 1..22: mol_type = other DNA
attatatatgcaaaagtctgtt

SEQ ID NO: 46273 - DNA, 22 bp, synthetic construct
  misc_feature 1..22: note = chemically synthesized
  source 1..22: mol_type = other DNA
tatatgcaaaagtctgtttggc

SEQ ID NO: 46274 - DNA, 22 bp, synthetic construct
  misc_feature 1..22: note = chemically synthesized
  source 1..22: mol_type = other DNA
tttggctagaaaagataatact

SEQ ID NO: 46275 - DNA, 22 bp, synthetic construct
  misc_feature 1..22: note = chemically synthesized
  source 1..22: mol_type = other DNA
ggctagaaaagataatactcac

SEQ ID NO: 46276 - DNA, 22 bp, synthetic construct
  misc_feature 1..22: note = chemically synthesized
  source 1..22: mol_type = other DNA
gctagaaaagataatactcaca

SEQ ID NO: 46277 - DNA, 22 bp, synthetic construct
  misc_feature 1..22: note = chemically synthesized
  source 1..22: mol_type = other DNA
gaaaagataatactcacaggtt

SEQ ID NO: 46278 - DNA, 22 bp, synthetic construct
  misc_feature 1..22: note = chemically synthesized
  source 1..22: mol_type = other DNA
acaggtttcaggggttaagcca

SEQ ID NO: 46279 - DNA, 22 bp, synthetic construct
  misc_feature 1..22: note = chemically synthesized
  source 1..22: mol_type = other DNA
caggggttaagccatacatatc

SEQ ID NO: 46280 - DNA, 22 bp, synthetic construct
  misc_feature 1..22: note = chemically synthesized
  source 1..22: mol_type = other DNA
aggggttaagccatacatatct

SEQ ID NO: 46281 - DNA, 22 bp, synthetic construct
  misc_feature 1..22: note = chemically synthesized
  source 1..22: mol_type = other DNA
agccatacatatctttcagagt

SEQ ID NO: 46282 - DNA, 22 bp, synthetic construct
  misc_feature 1..22: note = chemically synthesized
  source 1..22: mol_type = other DNA
tcagagtgagccattagccatt

SEQ ID NO: 46283 - DNA, 22 bp, synthetic construct
  misc_feature 1..22: note = chemically synthesized
  source 1..22: mol_type = other DNA
cagagtgagccattagccatta

SEQ ID NO: 46284 - DNA, 22 bp, synthetic construct
  misc_feature 1..22: note = chemically synthesized
  source 1..22: mol_type = other DNA
agagtgagccattagccattat

SEQ ID NO: 46285 - DNA, 22 bp, synthetic construct
  misc_feature 1..22: note = chemically synthesized
  source 1..22: mol_type = other DNA
gccattattcagcctactgcga

SEQ ID NO: 46286 - DNA, 22 bp, synthetic construct
  misc_feature 1..22: note = chemically synthesized
  source 1..22: mol_type = other DNA
ttcagcctactgcgataatgtg

SEQ ID NO: 46287 - DNA, 22 bp, synthetic construct
  misc_feature 1..22: note = chemically synthesized
  source 1..22: mol_type = other DNA
agcctactgcgataatgtgcaa

SEQ ID NO: 46288 - DNA, 22 bp, synthetic construct
  misc_feature 1..22: note = chemically synthesized
  source 1..22: mol_type = other DNA
ctgcgataatgtgcaagttccc

SEQ ID NO: 46289 - DNA, 22 bp, synthetic construct
  misc_feature 1..22: note = chemically synthesized
  source 1..22: mol_type = other DNA
cgataatgtgcaagttcccttt

SEQ ID NO: 46290 - DNA, 22 bp, synthetic construct
  misc_feature 1..22: note = chemically synthesized
  source 1..22: mol_type = other DNA
cctttacaatctatgttctatg

SEQ ID NO: 46291 - DNA, 22 bp, synthetic construct
  misc_feature 1..22: note = chemically synthesized
  source 1..22: mol_type = other DNA
tacaatctatgttctatgttcc

SEQ ID NO: 46292 - DNA, 22 bp, synthetic construct
  misc_feature 1..22: note = chemically synthesized
  source 1..22: mol_type = other DNA
acaatctatgttctatgttccc

SEQ ID NO: 46293 - DNA, 22 bp, synthetic construct
  misc_feature 1..22: note = chemically synthesized
  source 1..22: mol_type = other DNA
caatctatgttctatgttccca

SEQ ID NO: 46294 - DNA, 22 bp, synthetic construct
  misc_feature 1..22: note = chemically synthesized
  source 1..22: mol_type = other DNA
tgttctatgttcccatcaaggt

SEQ ID NO: 46295 - DNA, 22 bp, synthetic construct
  misc_feature 1..22: note = chemically synthesized
  source 1..22: mol_type = other DNA
tatgttcccatcaaggttaatt

SEQ ID NO: 46296 - DNA, 22 bp, synthetic construct
  misc_feature 1..22: note = chemically synthesized
  source 1..22: mol_type = other DNA
tgttcccatcaaggttaattag

SEQ ID NO: 46297 - DNA, 22 bp, synthetic construct
  misc_feature 1..22: note = chemically synthesized
  source 1..22: mol_type = other DNA
ccatcaaggttaattagaaata

SEQ ID NO: 46298 - DNA, 22 bp, synthetic construct
  misc_feature 1..22: note = chemically synthesized
  source 1..22: mol_type = other DNA
attagaaatattagactctttt

SEQ ID NO: 46299 - DNA, 22 bp, synthetic construct
  misc_feature 1..22: note = chemically synthesized
  source 1..22: mol_type = other DNA
gaaatattagactctttttcca

SEQ ID NO: 46300 - DNA, 22 bp, synthetic construct
  misc_feature 1..22: note = chemically synthesized
  source 1..22: mol_type = other DNA
gactctttttccacagaaaaaa

SEQ ID NO: 46301 - DNA, 22 bp, synthetic construct
  misc_feature 1..22: note = chemically synthesized
  source 1..22: mol_type = other DNA
tttttccacagaaaaaaaaaat

SEQ ID NO: 46302 - DNA, 22 bp, synthetic construct
  misc_feature 1..22: note = chemically synthesized
  source 1..22: mol_type = other DNA
tttccacagaaaaaaaaaatgt

SEQ ID NO: 46303 - DNA, 22 bp, synthetic construct
  misc_feature 1..22: note = chemically synthesized
  source 1..22: mol_type = other DNA
ttccacagaaaaaaaaaatgta

SEQ ID NO: 46304 - DNA, 22 bp, synthetic construct
  misc_feature 1..22: note = chemically synthesized
  source 1..22: mol_type = other DNA
tccacagaaaaaaaaaatgtag

SEQ ID NO: 46305 - DNA, 22 bp, synthetic construct
  misc_feature 1..22: note = chemically synthesized
  source 1..22: mol_type = other DNA
ccacagaaaaaaaaaatgtagc

SEQ ID NO: 46306 - DNA, 22 bp, synthetic construct
  misc_feature 1..22: note = chemically synthesized
  source 1..22: mol_type = other DNA
cacagaaaaaaaaaatgtagca

SEQ ID NO: 46307 - DNA, 22 bp, synthetic construct
  misc_feature 1..22: note = chemically synthesized
  source 1..22: mol_type = other DNA
catctctaccctgacttctctc

SEQ ID NO: 46308 - DNA, 22 bp, synthetic construct
  misc_feature 1..22: note = chemically synthesized
  source 1..22: mol_type = other DNA
atctctaccctgacttctctct

SEQ ID NO: 46309 - DNA, 22 bp, synthetic construct
  misc_feature 1..22: note = chemically synthesized
  source 1..22: mol_type = other DNA
taccctgacttctctctctttc

SEQ ID NO: 46310 - DNA, 22 bp, synthetic construct
  misc_feature 1..22: note = chemically synthesized
  source 1..22: mol_type = other DNA
ccctgacttctctctctttcct

SEQ ID NO: 46311 - DNA, 22 bp, synthetic construct
  misc_feature 1..22: note = chemically synthesized
  source 1..22: mol_type = other DNA
acttctctctctttccttcatg

SEQ ID NO: 46312 - DNA, 22 bp, synthetic construct
  misc_feature 1..22: note = chemically synthesized
  source 1..22: mol_type = other DNA
ctctctctttccttcatgccca

SEQ ID NO: 46313 - DNA, 22 bp, synthetic construct
  misc_feature 1..22: note = chemically synthesized
  source 1..22: mol_type = other DNA
tctctctttccttcatgcccag

SEQ ID NO: 46314 - DNA, 22 bp, synthetic construct
  misc_feature 1..22: note = chemically synthesized
  source 1..22: mol_type = other DNA
tctctttccttcatgcccagta

SEQ ID NO: 46315 - DNA, 22 bp, synthetic construct
  misc_feature 1..22: note = chemically synthesized
  source 1..22: mol_type = other DNA
tctttccttcatgcccagtaag

SEQ ID NO: 46316 - DNA, 22 bp, synthetic construct
  misc_feature 1..22: note = chemically synthesized
  source 1..22: mol_type = other DNA
tttccttcatgcccagtaagag

SEQ ID NO: 46317 - DNA, 22 bp, synthetic construct
  misc_feature 1..22: note = chemically synthesized
  source 1..22: mol_type = other DNA
tccttcatgcccagtaagagga

SEQ ID NO: 46318 - DNA, 22 bp, synthetic construct
  misc_feature 1..22: note = chemically synthesized
  source 1..22: mol_type = other DNA
ccttcatgcccagtaagaggaa

SEQ ID NO: 46319 - DNA, 22 bp, synthetic construct
  misc_feature 1..22: note = chemically synthesized
  source 1..22: mol_type = other DNA
cttcatgcccagtaagaggaag

SEQ ID NO: 46320 - DNA, 22 bp, synthetic construct
  misc_feature 1..22: note = chemically synthesized
  source 1..22: mol_type = other DNA
catgcccagtaagaggaagtga

SEQ ID NO: 46321 - DNA, 22 bp, synthetic construct
  misc_feature 1..22: note = chemically synthesized
  source 1..22: mol_type = other DNA
atgcccagtaagaggaagtgag

SEQ ID NO: 46322 - DNA, 22 bp, synthetic construct
  misc_feature 1..22: note = chemically synthesized
  source 1..22: mol_type = other DNA
ttcatctcatcaggtgttacct

SEQ ID NO: 46323 - DNA, 22 bp, synthetic construct
  misc_feature 1..22: note = chemically synthesized
  source 1..22: mol_type = other DNA
atctcatcaggtgttacctaga

SEQ ID NO: 46324 - DNA, 22 bp, synthetic construct
  misc_feature 1..22: note = chemically synthesized
  source 1..22: mol_type = other DNA
atcaggtgttacctagaatcag

SEQ ID NO: 46325 - DNA, 22 bp, synthetic construct
  misc_feature 1..22: note = chemically synthesized
  source 1..22: mol_type = other DNA
cctagaatcagagtcaggagaa

SEQ ID NO: 46326 - DNA, 22 bp, synthetic construct
  misc_feature 1..22: note = chemically synthesized
  source 1..22: mol_type = other DNA
gaatcagagtcaggagaaagca

SEQ ID NO: 46327 - DNA, 22 bp, synthetic construct
  misc_feature 1..22: note = chemically synthesized
  source 1..22: mol_type = other DNA
ataaaactactctgacaagtaa

SEQ ID NO: 46328 - DNA, 22 bp, synthetic construct
  misc_feature 1..22: note = chemically synthesized
  source 1..22: mol_type = other DNA
ctctgacaagtaaaccatatcc

SEQ ID NO: 46329 - DNA, 22 bp, synthetic construct
  misc_feature 1..22: note = chemically synthesized
  source 1..22: mol_type = other DNA
tgacaagtaaaccatatcctgg

SEQ ID NO: 46330 - DNA, 22 bp, synthetic construct
  misc_feature 1..22: note = chemically synthesized
  source 1..22: mol_type = other DNA
acaagtaaaccatatcctgggg

SEQ ID NO: 46331 - DNA, 22 bp, synthetic construct
  misc_feature 1..22: note = chemically synthesized
  source 1..22: mol_type = other DNA
gggaccaggtgagaattaaaaa

SEQ ID NO: 46332 - DNA, 22 bp, synthetic construct
  misc_feature 1..22: note = chemically synthesized
  source 1..22: mol_type = other DNA
aaaagctgtatactcataagct

SEQ ID NO: 46333 - DNA, 22 bp, synthetic construct
  misc_feature 1..22: note = chemically synthesized
  source 1..22: mol_type = other DNA
tatactcataagctgccaaaga

SEQ ID NO: 46334 - DNA, 22 bp, synthetic construct
  misc_feature 1..22: note = chemically synthesized
  source 1..22: mol_type = other DNA
ataagctgccaaagagctgatg

SEQ ID NO: 46335 - DNA, 22 bp, synthetic construct
  misc_feature 1..22: note = chemically synthesized
  source 1..22: mol_type = other DNA
ccaaagagctgatggtactgaa

SEQ ID NO: 46336 - DNA, 22 bp, synthetic construct
  misc_feature 1..22: note = chemically synthesized
  source 1..22: mol_type = other DNA
atggtactgaagtcacatggag

SEQ ID NO: 46337 - DNA, 22 bp, synthetic construct
  misc_feature 1..22: note = chemically synthesized
  source 1..22: mol_type = other DNA
aagtcacatggagctcaggaat

SEQ ID NO: 46338 - DNA, 22 bp, synthetic construct
  misc_feature 1..22: note = chemically synthesized
  source 1..22: mol_type = other DNA
aggaatttattcttgcatttag

SEQ ID NO: 46339 - DNA, 22 bp, synthetic construct
  misc_feature 1..22: note = chemically synthesized
  source 1..22: mol_type = other DNA
attcttgcatttagaaagtatg

SEQ ID NO: 46340 - DNA, 22 bp, synthetic construct
  misc_feature 1..22: note = chemically synthesized
  source 1..22: mol_type = other DNA
ttcttgcatttagaaagtatgc

SEQ ID NO: 46341 - DNA, 22 bp, synthetic construct
  misc_feature 1..22: note = chemically synthesized
  source 1..22: mol_type = other DNA
ttgcatttagaaagtatgcata

SEQ ID NO: 46342 - DNA, 22 bp, synthetic construct
  misc_feature 1..22: note = chemically synthesized
  source 1..22: mol_type = other DNA
gcatttagaaagtatgcatata

SEQ ID NO: 46343 - DNA, 22 bp, synthetic construct
  misc_feature 1..22: note = chemically synthesized
  source 1..22: mol_type = other DNA
catttagaaagtatgcatataa

SEQ ID NO: 46344 - DNA, 22 bp, synthetic construct
  misc_feature 1..22: note = chemically synthesized
  source 1..22: mol_type = other DNA
agaaagtatgcatataattctc

SEQ ID NO: 46345 - DNA, 22 bp, synthetic construct
  misc_feature 1..22: note = chemically synthesized
  source 1..22: mol_type = other DNA
gaaagtatgcatataattctct

SEQ ID NO: 46346 - DNA, 22 bp, synthetic construct
  misc_feature 1..22: note = chemically synthesized
  source 1..22: mol_type = other DNA
tctcgaaaagaaatgaaatcat

SEQ ID NO: 46347 - DNA, 22 bp, synthetic construct
  misc_feature 1..22: note = chemically synthesized
  source 1..22: mol_type = other DNA
tcgaaaagaaatgaaatcatat

SEQ ID NO: 46348 - DNA, 22 bp, synthetic construct
  misc_feature 1..22: note = chemically synthesized
  source 1..22: mol_type = other DNA
gaaaagaaatgaaatcatattt

SEQ ID NO: 46349 - DNA, 22 bp, synthetic construct
  misc_feature 1..22: note = chemically synthesized
  source 1..22: mol_type = other DNA
ttctgtcggatcaaattattca

SEQ ID NO: 46350 - DNA, 22 bp, synthetic construct
  misc_feature 1..22: note = chemically synthesized
  source 1..22: mol_type = other DNA
tctgtcggatcaaattattcag

SEQ ID NO: 46351 - DNA, 22 bp, synthetic construct
  misc_feature 1..22: note = chemically synthesized
  source 1..22: mol_type = other DNA
ctgtcggatcaaattattcaga

SEQ ID NO: 46352 - DNA, 22 bp, synthetic construct
  misc_feature 1..22: note = chemically synthesized
  source 1..22: mol_type = other DNA
tgtcggatcaaattattcagaa

SEQ ID NO: 46353 - DNA, 22 bp, synthetic construct
  misc_feature 1..22: note = chemically synthesized
  source 1..22: mol_type = other DNA
tcggatcaaattattcagaaat

SEQ ID NO: 46354 - DNA, 22 bp, synthetic construct
  misc_feature 1..22: note = chemically synthesized
  source 1..22: mol_type = other DNA
ttcagaaatccgaactgtagaa

SEQ ID NO: 46355 - DNA, 22 bp, synthetic construct
  misc_feature 1..22: note = chemically synthesized
  source 1..22: mol_type = other DNA
agaaatccgaactgtagaaaac

SEQ ID NO: 46356 - DNA, 22 bp, synthetic construct
  misc_feature 1..22: note = chemically synthesized
  source 1..22: mol_type = other DNA
tagaaaacatacaaacacactt

SEQ ID NO: 46357 - DNA, 22 bp, synthetic construct
  misc_feature 1..22: note = chemically synthesized
  source 1..22: mol_type = other DNA
gcttaatgttagctttttaatc

SEQ ID NO: 46358 - DNA, 22 bp, synthetic construct
  misc_feature 1..22: note = chemically synthesized
  source 1..22: mol_type = other DNA
cttaatgttagctttttaatct

SEQ ID NO: 46359 - DNA, 22 bp, synthetic construct
  misc_feature 1..22: note = chemically synthesized
  source 1..22: mol_type = other DNA
aatgttagctttttaatcttat

SEQ ID NO: 46360 - DNA, 22 bp, synthetic construct
  misc_feature 1..22: note = chemically synthesized
  source 1..22: mol_type = other DNA
atgttagctttttaatcttatt

SEQ ID NO: 46361 - DNA, 22 bp, synthetic construct
  misc_feature 1..22: note = chemically synthesized
  source 1..22: mol_type = other DNA
gctttttaatcttatttttgta

SEQ ID NO: 46362 - DNA, 22 bp, synthetic construct
  misc_feature 1..22: note = chemically synthesized
  source 1..22: mol_type = other DNA
tttaatcttatttttgtacaca

SEQ ID NO: 46363 - DNA, 22 bp, synthetic construct
  misc_feature 1..22: note = chemically synthesized
  source 1..22: mol_type = other DNA
ttaatcttatttttgtacacag

SEQ ID NO: 46364 - DNA, 22 bp, synthetic construct
  misc_feature 1..22: note = chemically synthesized
  source 1..22: mol_type = other DNA
taatcttatttttgtacacagt

SEQ ID NO: 46365 - DNA, 22 bp, synthetic construct
  misc_feature 1..22: note = chemically synthesized
  source 1..22: mol_type = other DNA
aatcttatttttgtacacagta

SEQ ID NO: 46366 - DNA, 22 bp, synthetic construct
  misc_feature 1..22: note = chemically synthesized
  source 1..22: mol_type = other DNA
atcttatttttgtacacagtat

SEQ ID NO: 46367 - DNA, 22 bp, synthetic construct
  misc_feature 1..22: note = chemically synthesized
  source 1..22: mol_type = other DNA
atttttgtacacagtatacttt

SEQ ID NO: 46368 - DNA, 22 bp, synthetic construct
  misc_feature 1..22: note = chemically synthesized
  source 1..22: mol_type = other DNA
tttttgtacacagtatactttt

SEQ ID NO: 46369 - DNA, 22 bp, synthetic construct
  misc_feature 1..22: note = chemically synthesized
  source 1..22: mol_type = other DNA
ttgtacacagtatacttttaca

SEQ ID NO: 46370 - DNA, 22 bp, synthetic construct
  misc_feature 1..22: note = chemically synthesized
  source 1..22: mol_type = other DNA
tgtacacagtatacttttacat

SEQ ID NO: 46371 - DNA, 22 bp, synthetic construct
  misc_feature 1..22: note = chemically synthesized
  source 1..22: mol_type = other DNA
gtacacagtatacttttacata

SEQ ID NO: 46372 - DNA, 22 bp, synthetic construct
  misc_feature 1..22: note = chemically synthesized
  source 1..22: mol_type = other DNA
tacacagtatacttttacatag

SEQ ID NO: 46373 - DNA, 22 bp, synthetic construct
  misc_feature 1..22: note = chemically synthesized
  source 1..22: mol_type = other DNA
ttacataggcactgaaccagct

SEQ ID NO: 46374 - DNA, 22 bp, synthetic construct
  misc_feature 1..22: note = chemically synthesized
  source 1..22: mol_type = other DNA
tacataggcactgaaccagctg

SEQ ID NO: 46375 - DNA, 22 bp, synthetic construct
  misc_feature 1..22: note = chemically synthesized
  source 1..22: mol_type = other DNA
acataggcactgaaccagctgg

SEQ ID NO: 46376 - DNA, 22 bp, synthetic construct
  misc_feature 1..22: note = chemically synthesized
  source 1..22: mol_type = other DNA
cataggcactgaaccagctgga

SEQ ID NO: 46377 - DNA, 22 bp, synthetic construct
  misc_feature 1..22: note = chemically synthesized
  source 1..22: mol_type = other DNA
aaccagctggaaatgaatgctt

SEQ ID NO: 46378 - DNA, 22 bp, synthetic construct
  misc_feature 1..22: note = chemically synthesized
  source 1..22: mol_type = other DNA
gaaatgaatgcttggattttcg

SEQ ID NO: 46379 - DNA, 22 bp, synthetic construct
  misc_feature 1..22: note = chemically synthesized
  source 1..22: mol_type = other DNA
ggattttcgcagctgataaaag

SEQ ID NO: 46380 - DNA, 22 bp, synthetic construct
  misc_feature 1..22: note = chemically synthesized
  source 1..22: mol_type = other DNA
gattttcgcagctgataaaagc

SEQ ID NO: 46381 - DNA, 22 bp, synthetic construct
  misc_feature 1..22: note = chemically synthesized
  source 1..22: mol_type = other DNA
tcgcagctgataaaagcagagt

SEQ ID NO: 46382 - DNA, 22 bp, synthetic construct
  misc_feature 1..22: note = chemically synthesized
  source 1..22: mol_type = other DNA
cgcagctgataaaagcagagtt

SEQ ID NO: 46383 - DNA, 22 bp, synthetic construct
  misc_feature 1..22: note = chemically synthesized
  source 1..22: mol_type = other DNA
gcagctgataaaagcagagttc

SEQ ID NO: 46384 - DNA, 22 bp, synthetic construct
  misc_feature 1..22: note = chemically synthesized
  source 1..22: mol_type = other DNA
ataaaagcagagttcagattct

SEQ ID NO: 46385 - DNA, 22 bp, synthetic construct
  misc_feature 1..22: note = chemically synthesized
  source 1..22: mol_type = other DNA
agattctgtccttgagctcaat

SEQ ID NO: 46386 - DNA, 22 bp, synthetic construct
  misc_feature 1..22: note = chemically synthesized
  source 1..22: mol_type = other DNA
tgtccttgagctcaatgtctgg

SEQ ID NO: 46387 - DNA, 22 bp, synthetic construct
  misc_feature 1..22: note = chemically synthesized
  source 1..22: mol_type = other DNA
tccttgagctcaatgtctggag

SEQ ID NO: 46388 - DNA, 22 bp, synthetic construct
  misc_feature 1..22: note = chemically synthesized
  source 1..22: mol_type = other DNA
gagctcaatgtctggagaaagc

SEQ ID NO: 46389 - DNA, 22 bp, synthetic construct
  misc_feature 1..22: note = chemically synthesized
  source 1..22: mol_type = other DNA
agctcaatgtctggagaaagca

SEQ ID NO: 46390 - DNA, 22 bp, synthetic construct
  misc_feature 1..22: note = chemically synthesized
  source 1..22: mol_type = other DNA
aatgtctggagaaagcagctgt

SEQ ID NO: 46391 - DNA, 22 bp, synthetic construct
  misc_feature 1..22: note = chemically synthesized
  source 1..22: mol_type = other DNA
gagaaagcagctgtgaatactg

SEQ ID NO: 46392 - DNA, 22 bp, synthetic construct
  misc_feature 1..22: note = chemically synthesized
  source 1..22: mol_type = other DNA
tgaatactgcttccttaattca

SEQ ID NO: 46393 - DNA, 22 bp, synthetic construct
  misc_feature 1..22: note = chemically synthesized
  source 1..22: mol_type = other DNA
cttccttaattcagatgccttt

SEQ ID NO: 46394 - DNA, 22 bp, synthetic construct
  misc_feature 1..22: note = chemically synthesized
  source 1..22: mol_type = other DNA
ccttaattcagatgcctttggc

SEQ ID NO: 46395 - DNA, 22 bp, synthetic construct
  misc_feature 1..22: note = chemically synthesized
  source 1..22: mol_type = other DNA
cttaattcagatgcctttggcc

SEQ ID NO: 46396 - DNA, 22 bp, synthetic construct
  misc_feature 1..22: note = chemically synthesized
  source 1..22: mol_type = other DNA
aattcagatgcctttggccgtg

SEQ ID NO: 46397 - DNA, 22 bp, synthetic construct
  misc_feature 1..22: note = chemically synthesized
  source 1..22: mol_type = other DNA
attcagatgcctttggccgtga

SEQ ID NO: 46398 - DNA, 22 bp, synthetic construct
  misc_feature 1..22: note = chemically synthesized
  source 1..22: mol_type = other DNA
agatgcctttggccgtgagggg

SEQ ID NO: 46399 - DNA, 22 bp, synthetic construct
  misc_feature 1..22: note = chemically synthesized
  source 1..22: mol_type = other DNA
tggccgtgaggggcatggcatt

SEQ ID NO: 46400 - DNA, 22 bp, synthetic construct
  misc_feature 1..22: note = chemically synthesized
  source 1..22: mol_type = other DNA
ggccgtgaggggcatggcattt

SEQ ID NO: 46401 - DNA, 22 bp, synthetic construct
  misc_feature 1..22: note = chemically synthesized
  source 1..22: mol_type = other DNA
gccgtgaggggcatggcatttt

SEQ ID NO: 46402 - DNA, 22 bp, synthetic construct
  misc_feature 1..22: note = chemically synthesized
  source 1..22: mol_type = other DNA
taaagctgcaataaactctgta

SEQ ID NO: 46403 - DNA, 22 bp, synthetic construct
  misc_feature 1..22: note = chemically synthesized
  source 1..22: mol_type = other DNA
aaagctgcaataaactctgtac

SEQ ID NO: 46404 - DNA, 22 bp, synthetic construct
  misc_feature 1..22: note = chemically synthesized
  source 1..22: mol_type = other DNA
aagctgcaataaactctgtact

SEQ ID NO: 46405 - DNA, 22 bp, synthetic construct
  misc_feature 1..22: note = chemically synthesized
  source 1..22: mol_type = other DNA
caataaactctgtactttttct

SEQ ID NO: 46406 - DNA, 22 bp, synthetic construct
  misc_feature 1..22: note = chemically synthesized
  source 1..22: mol_type = other DNA
tgtactttttctctcaggggat

SEQ ID NO: 46407 - DNA, 22 bp, synthetic construct
  misc_feature 1..22: note = chemically synthesized
  source 1..22: mol_type = other DNA
tactttttctctcaggggatta

SEQ ID NO: 46408 - DNA, 22 bp, synthetic construct
  misc_feature 1..22: note = chemically synthesized
  source 1..22: mol_type = other DNA
tttctctcaggggattagaaaa

SEQ ID NO: 46409 - DNA, 22 bp, synthetic construct
  misc_feature 1..22: note = chemically synthesized
  source 1..22: mol_type = other DNA
ttctctcaggggattagaaaaa

SEQ ID NO: 46410 - DNA, 22 bp, synthetic construct
  misc_feature 1..22: note = chemically synthesized
  source 1..22: mol_type = other DNA
tctctcaggggattagaaaaac

SEQ ID NO: 46411 - DNA, 22 bp, synthetic construct
  misc_feature 1..22: note = chemically synthesized
  source 1..22: mol_type = other DNA
ctctcaggggattagaaaaacc

SEQ ID NO: 46412 - DNA, 22 bp, synthetic construct
  misc_feature 1..22: note = chemically synthesized
  source 1..22: mol_type = other DNA
tctcaggggattagaaaaacca

SEQ ID NO: 46413 - DNA, 22 bp, synthetic construct
  misc_feature 1..22: note = chemically synthesized
  source 1..22: mol_type = other DNA
tcaggggattagaaaaaccaat

SEQ ID NO: 46414 - DNA, 22 bp, synthetic construct
  misc_feature 1..22: note = chemically synthesized
  source 1..22: mol_type = other DNA
aggggattagaaaaaccaattg

SEQ ID NO: 46415 - DNA, 22 bp, synthetic construct
  misc_feature 1..22: note = chemically synthesized
  source 1..22: mol_type = other DNA
gaaaaaccaattgatttgatag

SEQ ID NO: 46416 - DNA, 22 bp, synthetic construct
  misc_feature 1..22: note = chemically synthesized
  source 1..22: mol_type = other DNA
atttgatagtgactcagcagtt

SEQ ID NO: 46417 - DNA, 22 bp, synthetic construct
  misc_feature 1..22: note = chemically synthesized
  source 1..22: mol_type = other DNA
gatagtgactcagcagttttca

SEQ ID NO: 46418 - DNA, 22 bp, synthetic construct
  misc_feature 1..22: note = chemically synthesized
  source 1..22: mol_type = other DNA
atagtgactcagcagttttcac

SEQ ID NO: 46419 - DNA, 22 bp, synthetic construct
  misc_feature 1..22: note = chemically synthesized
  source 1..22: mol_type = other DNA
agcagttttcaccttcctcttt

SEQ ID NO: 46420 - DNA, 22 bp, synthetic construct
  misc_feature 1..22: note = chemically synthesized
  source 1..22: mol_type = other DNA
tcaccttcctctttagccaatg

SEQ ID NO: 46421 - DNA, 22 bp, synthetic construct
  misc_feature 1..22: note = chemically synthesized
  source 1..22: mol_type = other DNA
caccttcctctttagccaatgc

SEQ ID NO: 46422 - DNA, 22 bp, synthetic construct
  misc_feature 1..22: note = chemically synthesized
  source 1..22: mol_type = other DNA
accttcctctttagccaatgcc

SEQ ID NO: 46423 - DNA, 22 bp, synthetic construct
  misc_feature 1..22: note = chemically synthesized
  source 1..22: mol_type = other DNA
cctctttagccaatgccctgca

SEQ ID NO: 46424 - DNA, 22 bp, synthetic construct
  misc_feature 1..22: note = chemically synthesized
  source 1..22: mol_type = other DNA
ctctttagccaatgccctgcag

SEQ ID NO: 46425 - DNA, 22 bp, synthetic construct
  misc_feature 1..22: note = chemically synthesized
  source 1..22: mol_type = other DNA
tttagccaatgccctgcagcta

SEQ ID NO: 46426 - DNA, 22 bp, synthetic construct
  misc_feature 1..22: note = chemically synthesized
  source 1..22: mol_type = other DNA
tagccaatgccctgcagctaag

SEQ ID NO: 46427 - DNA, 22 bp, synthetic construct
  misc_feature 1..22: note = chemically synthesized
  source 1..22: mol_type = other DNA
agccaatgccctgcagctaaga

SEQ ID NO: 46428 - DNA, 22 bp, synthetic construct
  misc_feature 1..22: note = chemically synthesized
  source 1..22: mol_type = other DNA
gccaatgccctgcagctaagat

SEQ ID NO: 46429 - DNA, 22 bp, synthetic construct
  misc_feature 1..22: note = chemically synthesized
  source 1..22: mol_type = other DNA
cagctaagattgagaaacggat

SEQ ID NO: 46430 - DNA, 22 bp, synthetic construct
  misc_feature 1..22: note = chemically synthesized
  source 1..22: mol_type = other DNA
agattgagaaacggattcagaa

SEQ ID NO: 46431 - DNA, 22 bp, synthetic construct
  misc_feature 1..22: note = chemically synthesized
  source 1..22: mol_type = other DNA
agaaacggattcagaactcaca

SEQ ID NO: 46432 - DNA, 22 bp, synthetic construct
  misc_feature 1..22: note = chemically synthesized
  source 1..22: mol_type = other DNA
agaactcacacctcttggtgct

SEQ ID NO: 46433 - DNA, 22 bp, synthetic construct
  misc_feature 1..22: note = chemically synthesized
  source 1..22: mol_type = other DNA
acacctcttggtgcttggtggc

SEQ ID NO: 46434 - DNA, 22 bp, synthetic construct
  misc_feature 1..22: note = chemically synthesized
  source 1..22: mol_type = other DNA
ttggtgcttggtggctcccttc

SEQ ID NO: 46435 - DNA, 22 bp, synthetic construct
  misc_feature 1..22: note = chemically synthesized
  source 1..22: mol_type = other DNA
ggtgcttggtggctcccttcca

SEQ ID NO: 46436 - DNA, 22 bp, synthetic construct
  misc_feature 1..22: note = chemically synthesized
  source 1..22: mol_type = other DNA
gtgcttggtggctcccttccaa

SEQ ID NO: 46437 - DNA, 22 bp, synthetic construct
  misc_feature 1..22: note = chemically synthesized
  source 1..22: mol_type = other DNA
ggtggctcccttccaaaccatc

SEQ ID NO: 46438 - DNA, 22 bp, synthetic construct
  misc_feature 1..22: note = chemically synthesized
  source 1..22: mol_type = other DNA
gtggctcccttccaaaccatca

SEQ ID NO: 46439 - DNA, 22 bp, synthetic construct
  misc_feature 1..22: note = chemically synthesized
  source 1..22: mol_type = other DNA
ccttccaaaccatcagctgttc

SEQ ID NO: 46440 - DNA, 22 bp, synthetic construct
  misc_feature 1..22: note = chemically synthesized
  source 1..22: mol_type = other DNA
ccaaaccatcagctgttctttc

SEQ ID NO: 46441 - DNA, 22 bp, synthetic construct
  misc_feature 1..22: note = chemically synthesized
  source 1..22: mol_type = other DNA
caaaccatcagctgttctttct

SEQ ID NO: 46442 - DNA, 22 bp, synthetic construct
  misc_feature 1..22: note = chemically synthesized
  source 1..22: mol_type = other DNA
ttctttctactttctttcctat

SEQ ID NO: 46443 - DNA, 22 bp, synthetic construct
  misc_feature 1..22: note = chemically synthesized
  source 1..22: mol_type = other DNA
tttctactttctttcctatttt

SEQ ID NO: 46444 - DNA, 22 bp, synthetic construct
  misc_feature 1..22: note = chemically synthesized
  source 1..22: mol_type = other DNA
tctactttctttcctatttttt

SEQ ID NO: 46445 - DNA, 22 bp, synthetic construct
  misc_feature 1..22: note = chemically synthesized
  source 1..22: mol_type = other DNA
ctactttctttcctatttttta

SEQ ID NO: 46446 - DNA, 22 bp, synthetic construct
  misc_feature 1..22: note = chemically synthesized
  source 1..22: mol_type = other DNA
tactttctttcctattttttaa

SEQ ID NO: 46447 - DNA, 22 bp, synthetic construct
  misc_feature 1..22: note = chemically synthesized
  source 1..22: mol_type = other DNA
ctttctttcctattttttaaag

SEQ ID NO: 46448 - DNA, 22 bp, synthetic construct
  misc_feature 1..22: note = chemically synthesized
  source 1..22: mol_type = other DNA
tctttcctattttttaaagcac

SEQ ID NO: 46449 - DNA, 22 bp, synthetic construct
  misc_feature 1..22: note = chemically synthesized
  source 1..22: mol_type = other DNA
ctttcctattttttaaagcaca

SEQ ID NO: 46450 - DNA, 22 bp, synthetic construct
  misc_feature 1..22: note = chemically synthesized
  source 1..22: mol_type = other DNA
tttcctattttttaaagcacag

SEQ ID NO: 46451 - DNA, 22 bp, synthetic construct
  misc_feature 1..22: note = chemically synthesized
  source 1..22: mol_type = other DNA
tcctattttttaaagcacagtc

SEQ ID NO: 46452 - DNA, 22 bp, synthetic construct
  misc_feature 1..22: note = chemically synthesized
  source 1..22: mol_type = other DNA
cctattttttaaagcacagtct

SEQ ID NO: 46453 - DNA, 22 bp, synthetic construct
  misc_feature 1..22: note = chemically synthesized
  source 1..22: mol_type = other DNA
ctattttttaaagcacagtctg

SEQ ID NO: 46454 - DNA, 22 bp, synthetic construct
  misc_feature 1..22: note = chemically synthesized
  source 1..22: mol_type = other DNA
ttttttaaagcacagtctgaat

SEQ ID NO: 46455 - DNA, 22 bp, synthetic construct
  misc_feature 1..22: note = chemically synthesized
  source 1..22: mol_type = other DNA
tttaaagcacagtctgaatcaa

SEQ ID NO: 46456 - DNA, 22 bp, synthetic construct
  misc_feature 1..22: note = chemically synthesized
  source 1..22: mol_type = other DNA
ttaaagcacagtctgaatcaag

SEQ ID NO: 46457 - DNA, 22 bp, synthetic construct
  misc_feature 1..22: note = chemically synthesized
  source 1..22: mol_type = other DNA
taaagcacagtctgaatcaagt

SEQ ID NO: 46458 - DNA, 22 bp, synthetic construct
  misc_feature 1..22: note = chemically synthesized
  source 1..22: mol_type = other DNA
aaagcacagtctgaatcaagtg

SEQ ID NO: 46459 - DNA, 22 bp, synthetic construct
  misc_feature 1..22: note = chemically synthesized
  source 1..22: mol_type = other DNA
aagcacagtctgaatcaagtgc

SEQ ID NO: 46460 - DNA, 22 bp, synthetic construct
  misc_feature 1..22: note = chemically synthesized
  source 1..22: mol_type = other DNA
aatcaagtgcttcagaaccatt

SEQ ID NO: 46461 - DNA, 22 bp, synthetic construct
  misc_feature 1..22: note = chemically synthesized
  source 1..22: mol_type = other DNA
cagaaccatttatactaactcg

SEQ ID NO: 46462 - DNA, 22 bp, synthetic construct
  misc_feature 1..22: note = chemically synthesized
  source 1..22: mol_type = other DNA
agaaccatttatactaactcgt

SEQ ID NO: 46463 - DNA, 22 bp, synthetic construct
  misc_feature 1..22: note = chemically synthesized
  source 1..22: mol_type = other DNA
atactaactcgtgttccaaaca

SEQ ID NO: 46464 - DNA, 22 bp, synthetic construct
  misc_feature 1..22: note = chemically synthesized
  source 1..22: mol_type = other DNA
tactaactcgtgttccaaacac

SEQ ID NO: 46465 - DNA, 22 bp, synthetic construct
  misc_feature 1..22: note = chemically synthesized
  source 1..22: mol_type = other DNA
actcgtgttccaaacacataac

SEQ ID NO: 46466 - DNA, 22 bp, synthetic construct
  misc_feature 1..22: note = chemically synthesized
  source 1..22: mol_type = other DNA
gtgttccaaacacataaccctg

SEQ ID NO: 46467 - DNA, 22 bp, synthetic construct
  misc_feature 1..22: note = chemically synthesized
  source 1..22: mol_type = other DNA
caaacacataaccctgaaccct

SEQ ID NO: 46468 - DNA, 22 bp, synthetic construct
  misc_feature 1..22: note = chemically synthesized
  source 1..22: mol_type = other DNA
aaccctcttctaaggccaccag

SEQ ID NO: 46469 - DNA, 22 bp, synthetic construct
  misc_feature 1..22: note = chemically synthesized
  source 1..22: mol_type = other DNA
ttctaaggccaccagttacaaa

SEQ ID NO: 46470 - DNA, 22 bp, synthetic construct
  misc_feature 1..22: note = chemically synthesized
  source 1..22: mol_type = other DNA
ctaaggccaccagttacaaaga

SEQ ID NO: 46471 - DNA, 22 bp, synthetic construct
  misc_feature 1..22: note = chemically synthesized
  source 1..22: mol_type = other DNA
taaggccaccagttacaaagaa

SEQ ID NO: 46472 - DNA, 22 bp, synthetic construct
  misc_feature 1..22: note = chemically synthesized
  source 1..22: mol_type = other DNA
aggccaccagttacaaagaatg

SEQ ID NO: 46473 - DNA, 22 bp, synthetic construct
  misc_feature 1..22: note = chemically synthesized
  source 1..22: mol_type = other DNA
caaagaatggggaaggttaatg

SEQ ID NO: 46474 - DNA, 22 bp, synthetic construct
  misc_feature 1..22: note = chemically synthesized
  source 1..22: mol_type = other DNA
atgagtaactccaccagtgcct

SEQ ID NO: 46475 - DNA, 22 bp, synthetic construct
  misc_feature 1..22: note = chemically synthesized
  source 1..22: mol_type = other DNA
caccagtgcctgccagaaagct

SEQ ID NO: 46476 - DNA, 22 bp, synthetic construct
  misc_feature 1..22: note = chemically synthesized
  source 1..22: mol_type = other DNA
ccagaaagctcagctgtactcc

SEQ ID NO: 46477 - DNA, 22 bp, synthetic construct
  misc_feature 1..22: note = chemically synthesized
  source 1..22: mol_type = other DNA
agctgtactccagccttccttc

SEQ ID NO: 46478 - DNA, 22 bp, synthetic construct
  misc_feature 1..22: note = chemically synthesized
  source 1..22: mol_type = other DNA
tactccagccttccttcctctc

SEQ ID NO: 46479 - DNA, 22 bp, synthetic construct
  misc_feature 1..22: note = chemically synthesized
  source 1..22: mol_type = other DNA
cagccttccttcctctcttgca

SEQ ID NO: 46480 - DNA, 22 bp, synthetic construct
  misc_feature 1..22: note = chemically synthesized
  source 1..22: mol_type = other DNA
ccttcctctcttgcagagagaa

SEQ ID NO: 46481 - DNA, 22 bp, synthetic construct
  misc_feature 1..22: note = chemically synthesized
  source 1..22: mol_type = other DNA
cttcctctcttgcagagagaaa

SEQ ID NO: 46482 - DNA, 22 bp, synthetic construct
  misc_feature 1..22: note = chemically synthesized
  source 1..22: mol_type = other DNA
cctctcttgcagagagaaacaa

SEQ ID NO: 46483 - DNA, 22 bp, synthetic construct
  misc_feature 1..22: note = chemically synthesized
  source 1..22: mol_type = other DNA
ctctcttgcagagagaaacaat

SEQ ID NO: 46484 - DNA, 22 bp, synthetic construct
  misc_feature 1..22: note = chemically synthesized
  source 1..22: mol_type = other DNA
tcttgcagagagaaacaatgcg

SEQ ID NO: 46485 - DNA, 22 bp, synthetic construct
  misc_feature 1..22: note = chemically synthesized
  source 1..22: mol_type = other DNA
ttgcagagagaaacaatgcggc

SEQ ID NO: 46486 - DNA, 22 bp, synthetic construct
  misc_feature 1..22: note = chemically synthesized
  source 1..22: mol_type = other DNA
gcagagagaaacaatgcggcag

SEQ ID NO: 46487 - DNA, 22 bp, synthetic construct
  misc_feature 1..22: note = chemically synthesized
  source 1..22: mol_type = other DNA
cagagagaaacaatgcggcagt

SEQ ID NO: 46488 - DNA, 22 bp, synthetic construct
  misc_feature 1..22: note = chemically synthesized
  source 1..22: mol_type = other DNA
aacaaagcgaaggcactgtaat

SEQ ID NO: 46489 - DNA, 22 bp, synthetic construct
  misc_feature 1..22: note = chemically synthesized
  source 1..22: mol_type = other DNA
taatgcccagtggcttcagtca

SEQ ID NO: 46490 - DNA, 22 bp, synthetic construct
  misc_feature 1..22: note = chemically synthesized
  source 1..22: mol_type = other DNA
cagtcacaggctggtctaaaat

SEQ ID NO: 46491 - DNA, 22 bp, synthetic construct
  misc_feature 1..22: note = chemically synthesized
  source 1..22: mol_type = other DNA
agtcacaggctggtctaaaatt

SEQ ID NO: 46492 - DNA, 22 bp, synthetic construct
  misc_feature 1..22: note = chemically synthesized
  source 1..22: mol_type = other DNA
gtctaaaattccatttcacaga

SEQ ID NO: 46493 - DNA, 22 bp, synthetic construct
  misc_feature 1..22: note = chemically synthesized
  source 1..22: mol_type = other DNA
aaattccatttcacagaattga

SEQ ID NO: 46494 - DNA, 22 bp, synthetic construct
  misc_feature 1..22: note = chemically synthesized
  source 1..22: mol_type = other DNA
catttcacagaattgaagataa

SEQ ID NO: 46495 - DNA, 22 bp, synthetic construct
  misc_feature 1..22: note = chemically synthesized
  source 1..22: mol_type = other DNA
cacagaattgaagataatttgg

SEQ ID NO: 46496 - DNA, 22 bp, synthetic construct
  misc_feature 1..22: note = chemically synthesized
  source 1..22: mol_type = other DNA
acagaattgaagataatttggg

SEQ ID NO: 46497 - DNA, 22 bp, synthetic construct
  misc_feature 1..22: note = chemically synthesized
  source 1..22: mol_type = other DNA
aagataatttggggttattacc

SEQ ID NO: 46498 - DNA, 22 bp, synthetic construct
  misc_feature 1..22: note = chemically synthesized
  source 1..22: mol_type = other DNA
ggggttattaccaattctcagc

SEQ ID NO: 46499 - DNA, 22 bp, synthetic construct
  misc_feature 1..22: note = chemically synthesized
  source 1..22: mol_type = other DNA
gggttattaccaattctcagca

SEQ ID NO: 46500 - DNA, 22 bp, synthetic construct
  misc_feature 1..22: note = chemically synthesized
  source 1..22: mol_type = other DNA
ttaccaattctcagcagctcaa

SEQ ID NO: 46501 - DNA, 22 bp, synthetic construct
  misc_feature 1..22: note = chemically synthesized
  source 1..22: mol_type = other DNA
ccaattctcagcagctcaaatt

SEQ ID NO: 46502 - DNA, 22 bp, synthetic construct
  misc_feature 1..22: note = chemically synthesized
  source 1..22: mol_type = other DNA
tcagcagctcaaattcaatccc

SEQ ID NO: 46503 - DNA, 22 bp, synthetic construct
  misc_feature 1..22: note = chemically synthesized
  source 1..22: mol_type = other DNA
agcagctcaaattcaatcccgt

SEQ ID NO: 46504 - DNA, 22 bp, synthetic construct
  misc_feature 1..22: note = chemically synthesized
  source 1..22: mol_type = other DNA
aaattcaatcccgttgatggtg

SEQ ID NO: 46505 - DNA, 22 bp, synthetic construct
  misc_feature 1..22: note = chemically synthesized
  source 1..22: mol_type = other DNA
aatcccgttgatggtgagcatg

SEQ ID NO: 46506 - DNA, 22 bp, synthetic construct
  misc_feature 1..22: note = chemically synthesized
  source 1..22: mol_type = other DNA
atggtgagcatggggttcattt

SEQ ID NO: 46507 - DNA, 22 bp, synthetic construct
  misc_feature 1..22: note = chemically synthesized
  source 1..22: mol_type = other DNA
attttgagagtagaaaattgga

SEQ ID NO: 46508 - DNA, 22 bp, synthetic construct
  misc_feature 1..22: note = chemically synthesized
  source 1..22: mol_type = other DNA
tgagagtagaaaattggatgca

SEQ ID NO: 46509 - DNA, 22 bp, synthetic construct
  misc_feature 1..22: note = chemically synthesized
  source 1..22: mol_type = other DNA
gagagtagaaaattggatgcag

SEQ ID NO: 46510 - DNA, 22 bp, synthetic construct
  misc_feature 1..22: note = chemically synthesized
  source 1..22: mol_type = other DNA
agagtagaaaattggatgcagt

SEQ ID NO: 46511 - DNA, 22 bp, synthetic construct
  misc_feature 1..22: note = chemically synthesized
  source 1..22: mol_type = other DNA
gatgcagtggagaatcagaatg

SEQ ID NO: 46512 - DNA, 22 bp, synthetic construct
  misc_feature 1..22: note = chemically synthesized
  source 1..22: mol_type = other DNA
gatggtctctgccatttcccca

SEQ ID NO: 46513 - DNA, 22 bp, synthetic construct
  misc_feature 1..22: note = chemically synthesized
  source 1..22: mol_type = other DNA
tgccatttccccaaagatatca

SEQ ID NO: 46514 - DNA, 22 bp, synthetic construct
  misc_feature 1..22: note = chemically synthesized
  source 1..22: mol_type = other DNA
ccatttccccaaagatatcatc

SEQ ID NO: 46515 - DNA, 22 bp, synthetic construct
  misc_feature 1..22: note = chemically synthesized
  source 1..22: mol_type = other DNA
ccccaaagatatcatcctaact

SEQ ID NO: 46516 - DNA, 22 bp, synthetic construct
  misc_feature 1..22: note = chemically synthesized
  source 1..22: mol_type = other DNA
cccaaagatatcatcctaactg

SEQ ID NO: 46517 - DNA, 22 bp, synthetic construct
  misc_feature 1..22: note = chemically synthesized
  source 1..22: mol_type = other DNA
actgcatgctgctgcttttaac

SEQ ID NO: 46518 - DNA, 22 bp, synthetic construct
  misc_feature 1..22: note = chemically synthesized
  source 1..22: mol_type = other DNA
catgctgctgcttttaacaaat

SEQ ID NO: 46519 - DNA, 22 bp, synthetic construct
  misc_feature 1..22: note = chemically synthesized
  source 1..22: mol_type = other DNA
ctgcttttaacaaatcagtata

SEQ ID NO: 46520 - DNA, 22 bp, synthetic construct
  misc_feature 1..22: note = chemically synthesized
  source 1..22: mol_type = other DNA
cttttaacaaatcagtatacaa

SEQ ID NO: 46521 - DNA, 22 bp, synthetic construct
  misc_feature 1..22: note = chemically synthesized
  source 1..22: mol_type = other DNA
ttaacaaatcagtatacaactt

SEQ ID NO: 46522 - DNA, 22 bp, synthetic construct
  misc_feature 1..22: note = chemically synthesized
  source 1..22: mol_type = other DNA
taacaaatcagtatacaactta

SEQ ID NO: 46523 - DNA, 22 bp, synthetic construct
  misc_feature 1..22: note = chemically synthesized
  source 1..22: mol_type = other DNA
aacaaatcagtatacaacttag

SEQ ID NO: 46524 - DNA, 22 bp, synthetic construct
  misc_feature 1..22: note = chemically synthesized
  source 1..22: mol_type = other DNA
acaaatcagtatacaacttagt

SEQ ID NO: 46525 - DNA, 22 bp, synthetic construct
  misc_feature 1..22: note = chemically synthesized
  source 1..22: mol_type = other DNA
agtattttttgtgttgacaaat

SEQ ID NO: 46526 - DNA, 22 bp, synthetic construct
  misc_feature 1..22: note = chemically synthesized
  source 1..22: mol_type = other DNA
gtattttttgtgttgacaaatt

SEQ ID NO: 46527 - DNA, 22 bp, synthetic construct
  misc_feature 1..22: note = chemically synthesized
  source 1..22: mol_type = other DNA
tttgtgttgacaaattttcaaa

SEQ ID NO: 46528 - DNA, 22 bp, synthetic construct
  misc_feature 1..22: note = chemically synthesized
  source 1..22: mol_type = other DNA
ttgtgttgacaaattttcaaat

SEQ ID NO: 46529 - DNA, 22 bp, synthetic construct
  misc_feature 1..22: note = chemically synthesized
  source 1..22: mol_type = other DNA
tgtgttgacaaattttcaaata

SEQ ID NO: 46530 - DNA, 22 bp, synthetic construct
  misc_feature 1..22: note = chemically synthesized
  source 1..22: mol_type = other DNA
gtgttgacaaattttcaaatat

SEQ ID NO: 46531 - DNA, 22 bp, synthetic construct
  misc_feature 1..22: note = chemically synthesized
  source 1..22: mol_type = other DNA
tgttgacaaattttcaaatata

SEQ ID NO: 46532 - DNA, 22 bp, synthetic construct
  misc_feature 1..22: note = chemically synthesized
  source 1..22: mol_type = other DNA
acaaattttcaaatatacaaaa

SEQ ID NO: 46533 - DNA, 22 bp, synthetic construct
  misc_feature 1..22: note = chemically synthesized
  source 1..22: mol_type = other DNA
tcaaatatacaaaatattgagt

SEQ ID NO: 46534 - DNA, 22 bp, synthetic construct
  misc_feature 1..22: note = chemically synthesized
  source 1..22: mol_type = other DNA
caaatatacaaaatattgagtc

SEQ ID NO: 46535 - DNA, 22 bp, synthetic construct
  misc_feature 1..22: note = chemically synthesized
  source 1..22: mol_type = other DNA
aaatatacaaaatattgagtct

SEQ ID NO: 46536 - DNA, 22 bp, synthetic construct
  misc_feature 1..22: note = chemically synthesized
  source 1..22: mol_type = other DNA
agtctgaaggcaaaaagaataa

SEQ ID NO: 46537 - DNA, 22 bp, synthetic construct
  misc_feature 1..22: note = chemically synthesized
  source 1..22: mol_type = other DNA
aaggcaaaaagaataatttttc

SEQ ID NO: 46538 - DNA, 22 bp, synthetic construct
  misc_feature 1..22: note = chemically synthesized
  source 1..22: mol_type = other DNA
ttcacttccattgcttcctagg

SEQ ID NO: 46539 - DNA, 22 bp, synthetic construct
  misc_feature 1..22: note = chemically synthesized
  source 1..22: mol_type = other DNA
tcacttccattgcttcctaggt

SEQ ID NO: 46540 - DNA, 22 bp, synthetic construct
  misc_feature 1..22: note = chemically synthesized
  source 1..22: mol_type = other DNA
cacttccattgcttcctaggtc

SEQ ID NO: 46541 - DNA, 22 bp, synthetic construct
  misc_feature 1..22: note = chemically synthesized
  source 1..22: mol_type = other DNA
acttccattgcttcctaggtca

SEQ ID NO: 46542 - DNA, 22 bp, synthetic construct
  misc_feature 1..22: note = chemically synthesized
  source 1..22: mol_type = other DNA
ccattgcttcctaggtcataac

SEQ ID NO: 46543 - DNA, 22 bp, synthetic construct
  misc_feature 1..22: note = chemically synthesized
  source 1..22: mol_type = other DNA
cattgcttcctaggtcataaca

SEQ ID NO: 46544 - DNA, 22 bp, synthetic construct
  misc_feature 1..22: note = chemically synthesized
  source 1..22: mol_type = other DNA
cttcctaggtcataacattcac

SEQ ID NO: 46545 - DNA, 22 bp, synthetic construct
  misc_feature 1..22: note = chemically synthesized
  source 1..22: mol_type = other DNA
cctaggtcataacattcacatc

SEQ ID NO: 46546 - DNA, 22 bp, synthetic construct
  misc_feature 1..22: note = chemically synthesized
  source 1..22: mol_type = other DNA
ctaggtcataacattcacatct

SEQ ID NO: 46547 - DNA, 22 bp, synthetic construct
  misc_feature 1..22: note = chemically synthesized
  source 1..22: mol_type = other DNA
ggtcataacattcacatctgat

SEQ ID NO: 46548 - DNA, 22 bp, synthetic construct
  misc_feature 1..22: note = chemically synthesized
  source 1..22: mol_type = other DNA
acatctgatatttcttccaaat

SEQ ID NO: 46549 - DNA, 22 bp, synthetic construct
  misc_feature 1..22: note = chemically synthesized
  source 1..22: mol_type = other DNA
atatttcttccaaatacagact

SEQ ID NO: 46550 - DNA, 22 bp, synthetic construct
  misc_feature 1..22: note = chemically synthesized
  source 1..22: mol_type = other DNA
cttccaaatacagactgttgtt

SEQ ID NO: 46551 - DNA, 22 bp, synthetic construct
  misc_feature 1..22: note = chemically synthesized
  source 1..22: mol_type = other DNA
ttccaaatacagactgttgttg

SEQ ID NO: 46552 - DNA, 22 bp, synthetic construct
  misc_feature 1..22: note = chemically synthesized
  source 1..22: mol_type = other DNA
ccaaatacagactgttgttggc

SEQ ID NO: 46553 - DNA, 22 bp, synthetic construct
  misc_feature 1..22: note = chemically synthesized
  source 1..22: mol_type = other DNA
caaatacagactgttgttggcc

SEQ ID NO: 46554 - DNA, 22 bp, synthetic construct
  misc_feature 1..22: note = chemically synthesized
  source 1..22: mol_type = other DNA
ttgttggcctgatcatcactca

SEQ ID NO: 46555 - DNA, 22 bp, synthetic construct
  misc_feature 1..22: note = chemically synthesized
  source 1..22: mol_type = other DNA
ttggcctgatcatcactcacac

SEQ ID NO: 46556 - DNA, 22 bp, synthetic construct
  misc_feature 1..22: note = chemically synthesized
  source 1..22: mol_type = other DNA
gcctgatcatcactcacacatc

SEQ ID NO: 46557 - DNA, 22 bp, synthetic construct
  misc_feature 1..22: note = chemically synthesized
  source 1..22: mol_type = other DNA
atcatcactcacacatccaggc

SEQ ID NO: 46558 - DNA, 22 bp, synthetic construct
  misc_feature 1..22: note = chemically synthesized
  source 1..22: mol_type = other DNA
acacatccaggcttgttacatc

SEQ ID NO: 46559 - DNA, 22 bp, synthetic construct
  misc_feature 1..22: note = chemically synthesized
  source 1..22: mol_type = other DNA
gttacatctccacgccactgag

SEQ ID NO: 46560 - DNA, 22 bp, synthetic construct
  misc_feature 1..22: note = chemically synthesized
  source 1..22: mol_type = other DNA
ttacatctccacgccactgagt

SEQ ID NO: 46561 - DNA, 22 bp, synthetic construct
  misc_feature 1..22: note = chemically synthesized
  source 1..22: mol_type = other DNA
catctccacgccactgagtatc

SEQ ID NO: 46562 - DNA, 22 bp, synthetic construct
  misc_feature 1..22: note = chemically synthesized
  source 1..22: mol_type = other DNA
cacgccactgagtatcagggaa

SEQ ID NO: 46563 - DNA, 22 bp, synthetic construct
  misc_feature 1..22: note = chemically synthesized
  source 1..22: mol_type = other DNA
agtatcagggaacctgccccaa

SEQ ID NO: 46564 - DNA, 22 bp, synthetic construct
  misc_feature 1..22: note = chemically synthesized
  source 1..22: mol_type = other DNA
ccccaatattcacgtaggttct

SEQ ID NO: 46565 - DNA, 22 bp, synthetic construct
  misc_feature 1..22: note = chemically synthesized
  source 1..22: mol_type = other DNA
acgtaggttcttttctattttc

SEQ ID NO: 46566 - DNA, 22 bp, synthetic construct
  misc_feature 1..22: note = chemically synthesized
  source 1..22: mol_type = other DNA
ttttctattttccctaagcgtc

SEQ ID NO: 46567 - DNA, 22 bp, synthetic construct
  misc_feature 1..22: note = chemically synthesized
  source 1..22: mol_type = other DNA
ttctattttccctaagcgtcgg

SEQ ID NO: 46568 - DNA, 22 bp, synthetic construct
  misc_feature 1..22: note = chemically synthesized
  source 1..22: mol_type = other DNA
tctattttccctaagcgtcggc

SEQ ID NO: 46569 - DNA, 22 bp, synthetic construct
  misc_feature 1..22: note = chemically synthesized
  source 1..22: mol_type = other DNA
ctattttccctaagcgtcggcc

SEQ ID NO: 46570 - DNA, 22 bp, synthetic construct
  misc_feature 1..22: note = chemically synthesized
  source 1..22: mol_type = other DNA
tattttccctaagcgtcggcca

SEQ ID NO: 46571 - DNA, 22 bp, synthetic construct
  misc_feature 1..22: note = chemically synthesized
  source 1..22: mol_type = other DNA
ttttccctaagcgtcggccaac

SEQ ID NO: 46572 - DNA, 22 bp, synthetic construct
  misc_feature 1..22: note = chemically synthesized
  source 1..22: mol_type = other DNA
tccctaagcgtcggccaacttt

SEQ ID NO: 46573 - DNA, 22 bp, synthetic construct
  misc_feature 1..22: note = chemically synthesized
  source 1..22: mol_type = other DNA
ccctaagcgtcggccaacttta

SEQ ID NO: 46574 - DNA, 22 bp, synthetic construct
  misc_feature 1..22: note = chemically synthesized
  source 1..22: mol_type = other DNA
cctaagcgtcggccaactttag

SEQ ID NO: 46575 - DNA, 22 bp, synthetic construct
  misc_feature 1..22: note = chemically synthesized
  source 1..22: mol_type = other DNA
agcgtcggccaactttagaaat

SEQ ID NO: 46576 - DNA, 22 bp, synthetic construct
  misc_feature 1..22: note = chemically synthesized
  source 1..22: mol_type = other DNA
tagaaataaagggacagagtac

SEQ ID NO: 46577 - DNA, 22 bp, synthetic construct
  misc_feature 1..22: note = chemically synthesized
  source 1..22: mol_type = other DNA
agaaataaagggacagagtaca

SEQ ID NO: 46578 - DNA, 22 bp, synthetic construct
  misc_feature 1..22: note = chemically synthesized
  source 1..22: mol_type = other DNA
gaaataaagggacagagtacaa

SEQ ID NO: 46579 - DNA, 22 bp, synthetic construct
  misc_feature 1..22: note = chemically synthesized
  source 1..22: mol_type = other DNA
taaagccgggcatccgggggag

SEQ ID NO: 46580 - DNA, 22 bp, synthetic construct
  misc_feature 1..22: note = chemically synthesized
  source 1..22: mol_type = other DNA
aaagccgggcatccgggggagg

SEQ ID NO: 46581 - DNA, 22 bp, synthetic construct
  misc_feature 1..22: note = chemically synthesized
  source 1..22: mol_type = other DNA
aagccgggcatccgggggaggc

SEQ ID NO: 46582 - DNA, 22 bp, synthetic construct
  misc_feature 1..22: note = chemically synthesized
  source 1..22: mol_type = other DNA
cggtaggttccgtgatgcccca

SEQ ID NO: 46583 - DNA, 22 bp, synthetic construct
  misc_feature 1..22: note = chemically synthesized
  source 1..22: mol_type = other DNA
ggtaggttccgtgatgccccac

SEQ ID NO: 46584 - DNA, 22 bp, synthetic construct
  misc_feature 1..22: note = chemically synthesized
  source 1..22: mol_type = other DNA
cgtgatgccccacaagccacaa

SEQ ID NO: 46585 - DNA, 22 bp, synthetic construct
  misc_feature 1..22: note = chemically synthesized
  source 1..22: mol_type = other DNA
gtattagggattttcaaatggg

SEQ ID NO: 46586 - DNA, 22 bp, synthetic construct
  misc_feature 1..22: note = chemically synthesized
  source 1..22: mol_type = other DNA
tattagggattttcaaatgggg

SEQ ID NO: 46587 - DNA, 22 bp, synthetic construct
  misc_feature 1..22: note = chemically synthesized
  source 1..22: mol_type = other DNA
gggattttcaaatggggaggca

SEQ ID NO: 46588 - DNA, 22 bp, synthetic construct
  misc_feature 1..22: note = chemically synthesized
  source 1..22: mol_type = other DNA
tcaaatggggaggcagtgtgca

SEQ ID NO: 46589 - DNA, 22 bp, synthetic construct
  misc_feature 1..22: note = chemically synthesized
  source 1..22: mol_type = other DNA
caaatggggaggcagtgtgcaa

SEQ ID NO: 46590 - DNA, 22 bp, synthetic construct
  misc_feature 1..22: note = chemically synthesized
  source 1..22: mol_type = other DNA
aaatggggaggcagtgtgcaaa

SEQ ID NO: 46591 - DNA, 22 bp, synthetic construct
  misc_feature 1..22: note = chemically synthesized
  source 1..22: mol_type = other DNA
tacaaggtaatagaatatcaca

SEQ ID NO: 46592 - DNA, 22 bp, synthetic construct
  misc_feature 1..22: note = chemically synthesized
  source 1..22: mol_type = other DNA
acaaggtaatagaatatcacaa

SEQ ID NO: 46593 - DNA, 22 bp, synthetic construct
  misc_feature 1..22: note = chemically synthesized
  source 1..22: mol_type = other DNA
caaggtaatagaatatcacaag

SEQ ID NO: 46594 - DNA, 22 bp, synthetic construct
  misc_feature 1..22: note = chemically synthesized
  source 1..22: mol_type = other DNA
aaattgctaatgaagtttcggg

SEQ ID NO: 46595 - DNA, 22 bp, synthetic construct
  misc_feature 1..22: note = chemically synthesized
  source 1..22: mol_type = other DNA
ctaatgaagtttcgggcaccat

SEQ ID NO: 46596 - DNA, 22 bp, synthetic construct
  misc_feature 1..22: note = chemically synthesized
  source 1..22: mol_type = other DNA
atgaagtttcgggcaccattgt

SEQ ID NO: 46597 - DNA, 22 bp, synthetic construct
  misc_feature 1..22: note = chemically synthesized
  source 1..22: mol_type = other DNA
cgggcaccattgtcattgataa

SEQ ID NO: 46598 - DNA, 22 bp, synthetic construct
  misc_feature 1..22: note = chemically synthesized
  source 1..22: mol_type = other DNA
gggcaccattgtcattgataac

SEQ ID NO: 46599 - DNA, 22 bp, synthetic construct
  misc_feature 1..22: note = chemically synthesized
  source 1..22: mol_type = other DNA
tcattgataacatcttatcagg

SEQ ID NO: 46600 - DNA, 22 bp, synthetic construct
  misc_feature 1..22: note = chemically synthesized
  source 1..22: mol_type = other DNA
ataacatcttatcaggagacag

SEQ ID NO: 46601 - DNA, 22 bp, synthetic construct
  misc_feature 1..22: note = chemically synthesized
  source 1..22: mol_type = other DNA
atcaggagacagggtttttagg

SEQ ID NO: 46602 - DNA, 22 bp, synthetic construct
  misc_feature 1..22: note = chemically synthesized
  source 1..22: mol_type = other DNA
tcaggagacagggtttttagga

SEQ ID NO: 46603 - DNA, 22 bp, synthetic construct
  misc_feature 1..22: note = chemically synthesized
  source 1..22: mol_type = other DNA
ttaggatcaactggtctgacca

SEQ ID NO: 46604 - DNA, 22 bp, synthetic construct
  misc_feature 1..22: note = chemically synthesized
  source 1..22: mol_type = other DNA
taggatcaactggtctgaccaa

SEQ ID NO: 46605 - DNA, 22 bp, synthetic construct
  misc_feature 1..22: note = chemically synthesized
  source 1..22: mol_type = other DNA
aggatcaactggtctgaccaaa

SEQ ID NO: 46606 - DNA, 22 bp, synthetic construct
  misc_feature 1..22: note = chemically synthesized
  source 1..22: mol_type = other DNA
ggatcaactggtctgaccaaaa

SEQ ID NO: 46607 - DNA, 22 bp, synthetic construct
  misc_feature 1..22: note = chemically synthesized
  source 1..22: mol_type = other DNA
gtctgaccaaaatttattaggc

SEQ ID NO: 46608 - DNA, 22 bp, synthetic construct
  misc_feature 1..22: note = chemically synthesized
  source 1..22: mol_type = other DNA
accaaaatttattaggcgggaa

SEQ ID NO: 46609 - DNA, 22 bp, synthetic construct
  misc_feature 1..22: note = chemically synthesized
  source 1..22: mol_type = other DNA
attaggcgggaatttcctcttc

SEQ ID NO: 46610 - DNA, 22 bp, synthetic construct
  misc_feature 1..22: note = chemically synthesized
  source 1..22: mol_type = other DNA
ttaggcgggaatttcctcttcc

SEQ ID NO: 46611 - DNA, 22 bp, synthetic construct
  misc_feature 1..22: note = chemically synthesized
  source 1..22: mol_type = other DNA
ggcgggaatttcctcttcctaa

SEQ ID NO: 46612 - DNA, 22 bp, synthetic construct
  misc_feature 1..22: note = chemically synthesized
  source 1..22: mol_type = other DNA
cctcttcctaataagcctggga

SEQ ID NO: 46613 - DNA, 22 bp, synthetic construct
  misc_feature 1..22: note = chemically synthesized
  source 1..22: mol_type = other DNA
ctcttcctaataagcctgggag

SEQ ID NO: 46614 - DNA, 22 bp, synthetic construct
  misc_feature 1..22: note = chemically synthesized
  source 1..22: mol_type = other DNA
ttcctaataagcctgggagcgc

SEQ ID NO: 46615 - DNA, 22 bp, synthetic construct
  misc_feature 1..22: note = chemically synthesized
  source 1..22: mol_type = other DNA
cctaataagcctgggagcgctg

SEQ ID NO: 46616 - DNA, 22 bp, synthetic construct
  misc_feature 1..22: note = chemically synthesized
  source 1..22: mol_type = other DNA
ctaataagcctgggagcgctgt

SEQ ID NO: 46617 - DNA, 22 bp, synthetic construct
  misc_feature 1..22: note = chemically synthesized
  source 1..22: mol_type = other DNA
ataagcctgggagcgctgtggg

SEQ ID NO: 46618 - DNA, 22 bp, synthetic construct
  misc_feature 1..22: note = chemically synthesized
  source 1..22: mol_type = other DNA
ggagcgctgtgggagactgggg

SEQ ID NO: 46619 - DNA, 22 bp, synthetic construct
  misc_feature 1..22: note = chemically synthesized
  source 1..22: mol_type = other DNA
tgggagactggggtctatttca

SEQ ID NO: 46620 - DNA, 22 bp, synthetic construct
  misc_feature 1..22: note = chemically synthesized
  source 1..22: mol_type = other DNA
gggtctatttcacccctgcagt

SEQ ID NO: 46621 - DNA, 22 bp, synthetic construct
  misc_feature 1..22: note = chemically synthesized
  source 1..22: mol_type = other DNA
tttcacccctgcagtctcgacc

SEQ ID NO: 46622 - DNA, 22 bp, synthetic construct
  misc_feature 1..22: note = chemically synthesized
  source 1..22: mol_type = other DNA
cacccctgcagtctcgaccata

SEQ ID NO: 46623 - DNA, 22 bp, synthetic construct
  misc_feature 1..22: note = chemically synthesized
  source 1..22: mol_type = other DNA
acccctgcagtctcgaccataa

SEQ ID NO: 46624 - DNA, 22 bp, synthetic construct
  misc_feature 1..22: note = chemically synthesized
  source 1..22: mol_type = other DNA
cagtctcgaccataagagacag

SEQ ID NO: 46625 - DNA, 22 bp, synthetic construct
  misc_feature 1..22: note = chemically synthesized
  source 1..22: mol_type = other DNA
gaccataagagacaggcgcacc

SEQ ID NO: 46626 - DNA, 22 bp, synthetic construct
  misc_feature 1..22: note = chemically synthesized
  source 1..22: mol_type = other DNA
gaggggggctgtttataagcct

SEQ ID NO: 46627 - DNA, 22 bp, synthetic construct
  misc_feature 1..22: note = chemically synthesized
  source 1..22: mol_type = other DNA
tttataagcctatacctcctgg

SEQ ID NO: 46628 - DNA, 22 bp, synthetic construct
  misc_feature 1..22: note = chemically synthesized
  source 1..22: mol_type = other DNA
ataagcctatacctcctggctc

SEQ ID NO: 46629 - DNA, 22 bp, synthetic construct
  misc_feature 1..22: note = chemically synthesized
  source 1..22: mol_type = other DNA
taagcctatacctcctggctcg

SEQ ID NO: 46630 - DNA, 22 bp, synthetic construct
  misc_feature 1..22: note = chemically synthesized
  source 1..22: mol_type = other DNA
tacctcctggctcgtattctct

SEQ ID NO: 46631 - DNA, 22 bp, synthetic construct
  misc_feature 1..22: note = chemically synthesized
  source 1..22: mol_type = other DNA
ctggctcgtattctctttctca

SEQ ID NO: 46632 - DNA, 22 bp, synthetic construct
  misc_feature 1..22: note = chemically synthesized
  source 1..22: mol_type = other DNA
gctcgtattctctttctcaggg

SEQ ID NO: 46633 - DNA, 22 bp, synthetic construct
  misc_feature 1..22: note = chemically synthesized
  source 1..22: mol_type = other DNA
gtattctctttctcagggatgt

SEQ ID NO: 46634 - DNA, 22 bp, synthetic construct
  misc_feature 1..22: note = chemically synthesized
  source 1..22: mol_type = other DNA
tctttctcagggatgttccatg

SEQ ID NO: 46635 - DNA, 22 bp, synthetic construct
  misc_feature 1..22: note = chemically synthesized
  source 1..22: mol_type = other DNA
tttctcagggatgttccatgct

SEQ ID NO: 46636 - DNA, 22 bp, synthetic construct
  misc_feature 1..22: note = chemically synthesized
  source 1..22: mol_type = other DNA
tctcagggatgttccatgctga

SEQ ID NO: 46637 - DNA, 22 bp, synthetic construct
  misc_feature 1..22: note = chemically synthesized
  source 1..22: mol_type = other DNA
ctcagggatgttccatgctgag

SEQ ID NO: 46638 - DNA, 22 bp, synthetic construct
  misc_feature 1..22: note = chemically synthesized
  source 1..22: mol_type = other DNA
tcagggatgttccatgctgaga

SEQ ID NO: 46639 - DNA, 22 bp, synthetic construct
  misc_feature 1..22: note = chemically synthesized
  source 1..22: mol_type = other DNA
agggatgttccatgctgagaaa

SEQ ID NO: 46640 - DNA, 22 bp, synthetic construct
  misc_feature 1..22: note = chemically synthesized
  source 1..22: mol_type = other DNA
catgctgagaaaaagaattcag

SEQ ID NO: 46641 - DNA, 22 bp, synthetic construct
  misc_feature 1..22: note = chemically synthesized
  source 1..22: mol_type = other DNA
agaaaaagaattcagcgatatt

SEQ ID NO: 46642 - DNA, 22 bp, synthetic construct
  misc_feature 1..22: note = chemically synthesized
  source 1..22: mol_type = other DNA
agcgatatttctcccatttgct

SEQ ID NO: 46643 - DNA, 22 bp, synthetic construct
  misc_feature 1..22: note = chemically synthesized
  source 1..22: mol_type = other DNA
ctcccatttgcttttgaaagaa

SEQ ID NO: 46644 - DNA, 22 bp, synthetic construct
  misc_feature 1..22: note = chemically synthesized
  source 1..22: mol_type = other DNA
tcccatttgcttttgaaagaag

SEQ ID NO: 46645 - DNA, 22 bp, synthetic construct
  misc_feature 1..22: note = chemically synthesized
  source 1..22: mol_type = other DNA
ccatttgcttttgaaagaagag

SEQ ID NO: 46646 - DNA, 22 bp, synthetic construct
  misc_feature 1..22: note = chemically synthesized
  source 1..22: mol_type = other DNA
gcttttgaaagaagagaaatat

SEQ ID NO: 46647 - DNA, 22 bp, synthetic construct
  misc_feature 1..22: note = chemically synthesized
  source 1..22: mol_type = other DNA
cttttgaaagaagagaaatatg

SEQ ID NO: 46648 - DNA, 22 bp, synthetic construct
  misc_feature 1..22: note = chemically synthesized
  source 1..22: mol_type = other DNA
ttgaaagaagagaaatatggct

SEQ ID NO: 46649 - DNA, 22 bp, synthetic construct
  misc_feature 1..22: note = chemically synthesized
  source 1..22: mol_type = other DNA
tgaaagaagagaaatatggctc

SEQ ID NO: 46650 - DNA, 22 bp, synthetic construct
  misc_feature 1..22: note = chemically synthesized
  source 1..22: mol_type = other DNA
gaaagaagagaaatatggctct

SEQ ID NO: 46651 - DNA, 22 bp, synthetic construct
  misc_feature 1..22: note = chemically synthesized
  source 1..22: mol_type = other DNA
aaagaagagaaatatggctctg

SEQ ID NO: 46652 - DNA, 22 bp, synthetic construct
  misc_feature 1..22: note = chemically synthesized
  source 1..22: mol_type = other DNA
tgttctgcctggctcaccagca

SEQ ID NO: 46653 - DNA, 22 bp, synthetic construct
  misc_feature 1..22: note = chemically synthesized
  source 1..22: mol_type = other DNA
ttctgcctggctcaccagcagt

SEQ ID NO: 46654 - DNA, 22 bp, synthetic construct
  misc_feature 1..22: note = chemically synthesized
  source 1..22: mol_type = other DNA
tgcctggctcaccagcagtcag

SEQ ID NO: 46655 - DNA, 22 bp, synthetic construct
  misc_feature 1..22: note = chemically synthesized
  source 1..22: mol_type = other DNA
cctggctcaccagcagtcagag

SEQ ID NO: 46656 - DNA, 22 bp, synthetic construct
  misc_feature 1..22: note = chemically synthesized
  source 1..22: mol_type = other DNA
gctcaccagcagtcagagttta

SEQ ID NO: 46657 - DNA, 22 bp, synthetic construct
  misc_feature 1..22: note = chemically synthesized
  source 1..22: mol_type = other DNA
accagcagtcagagtttaaggt

SEQ ID NO: 46658 - DNA, 22 bp, synthetic construct
  misc_feature 1..22: note = chemically synthesized
  source 1..22: mol_type = other DNA
aaggttatctctcttattccct

SEQ ID NO: 46659 - DNA, 22 bp, synthetic construct
  misc_feature 1..22: note = chemically synthesized
  source 1..22: mol_type = other DNA
aggttatctctcttattccctg

SEQ ID NO: 46660 - DNA, 22 bp, synthetic construct
  misc_feature 1..22: note = chemically synthesized
  source 1..22: mol_type = other DNA
tctctcttattccctgaacaat

SEQ ID NO: 46661 - DNA, 22 bp, synthetic construct
  misc_feature 1..22: note = chemically synthesized
  source 1..22: mol_type = other DNA
tcttattccctgaacaattgct

SEQ ID NO: 46662 - DNA, 22 bp, synthetic construct
  misc_feature 1..22: note = chemically synthesized
  source 1..22: mol_type = other DNA
ttattccctgaacaattgctgt

SEQ ID NO: 46663 - DNA, 22 bp, synthetic construct
  misc_feature 1..22: note = chemically synthesized
  source 1..22: mol_type = other DNA
attccctgaacaattgctgtta

SEQ ID NO: 46664 - DNA, 22 bp, synthetic construct
  misc_feature 1..22: note = chemically synthesized
  source 1..22: mol_type = other DNA
ttccctgaacaattgctgttat

SEQ ID NO: 46665 - DNA, 22 bp, synthetic construct
  misc_feature 1..22: note = chemically synthesized
  source 1..22: mol_type = other DNA
cctgaacaattgctgttatcct

SEQ ID NO: 46666 - DNA, 22 bp, synthetic construct
  misc_feature 1..22: note = chemically synthesized
  source 1..22: mol_type = other DNA
aacaattgctgttatcctgttc

SEQ ID NO: 46667 - DNA, 22 bp, synthetic construct
  misc_feature 1..22: note = chemically synthesized
  source 1..22: mol_type = other DNA
ctgttatcctgttcttttttca

SEQ ID NO: 46668 - DNA, 22 bp, synthetic construct
  misc_feature 1..22: note = chemically synthesized
  source 1..22: mol_type = other DNA
ttatcctgttcttttttcaagg

SEQ ID NO: 46669 - DNA, 22 bp, synthetic construct
  misc_feature 1..22: note = chemically synthesized
  source 1..22: mol_type = other DNA
tcctgttcttttttcaaggtgt

SEQ ID NO: 46670 - DNA, 22 bp, synthetic construct
  misc_feature 1..22: note = chemically synthesized
  source 1..22: mol_type = other DNA
ttcttttttcaaggtgtccaca

SEQ ID NO: 46671 - DNA, 22 bp, synthetic construct
  misc_feature 1..22: note = chemically synthesized
  source 1..22: mol_type = other DNA
ttttttcaaggtgtccacattt

SEQ ID NO: 46672 - DNA, 22 bp, synthetic construct
  misc_feature 1..22: note = chemically synthesized
  source 1..22: mol_type = other DNA
ttttcaaggtgtccacatttca

SEQ ID NO: 46673 - DNA, 22 bp, synthetic construct
  misc_feature 1..22: note = chemically synthesized
  source 1..22: mol_type = other DNA
tttcaaggtgtccacatttcat

SEQ ID NO: 46674 - DNA, 22 bp, synthetic construct
  misc_feature 1..22: note = chemically synthesized
  source 1..22: mol_type = other DNA
ttcaaggtgtccacatttcatg

SEQ ID NO: 46675 - DNA, 22 bp, synthetic construct
  misc_feature 1..22: note = chemically synthesized
  source 1..22: mol_type = other DNA
tcaaggtgtccacatttcatgt

SEQ ID NO: 46676 - DNA, 22 bp, synthetic construct
  misc_feature 1..22: note = chemically synthesized
  source 1..22: mol_type = other DNA
caaggtgtccacatttcatgtt

SEQ ID NO: 46677 - DNA, 22 bp, synthetic construct
  misc_feature 1..22: note = chemically synthesized
  source 1..22: mol_type = other DNA
aaggtgtccacatttcatgttg

SEQ ID NO: 46678 - DNA, 22 bp, synthetic construct
  misc_feature 1..22: note = chemically synthesized
  source 1..22: mol_type = other DNA
catgttgctcaaacacacatgc

SEQ ID NO: 46679 - DNA, 22 bp, synthetic construct
  misc_feature 1..22: note = chemically synthesized
  source 1..22: mol_type = other DNA
atgttgctcaaacacacatgct

SEQ ID NO: 46680 - DNA, 22 bp, synthetic construct
  misc_feature 1..22: note = chemically synthesized
  source 1..22: mol_type = other DNA
ctcaaacacacatgctgtacaa

SEQ ID NO: 46681 - DNA, 22 bp, synthetic construct
  misc_feature 1..22: note = chemically synthesized
  source 1..22: mol_type = other DNA
aaacacacatgctgtacaattt

SEQ ID NO: 46682 - DNA, 22 bp, synthetic construct
  misc_feature 1..22: note = chemically synthesized
  source 1..22: mol_type = other DNA
tacaatttgtgcagttaatgca

SEQ ID NO: 46683 - DNA, 22 bp, synthetic construct
  misc_feature 1..22: note = chemically synthesized
  source 1..22: mol_type = other DNA
gtgcagttaatgcaattattac

SEQ ID NO: 46684 - DNA, 22 bp, synthetic construct
  misc_feature 1..22: note = chemically synthesized
  source 1..22: mol_type = other DNA
tgcagttaatgcaattattaca

SEQ ID NO: 46685 - DNA, 22 bp, synthetic construct
  misc_feature 1..22: note = chemically synthesized
  source 1..22: mol_type = other DNA
atgcaattattacagggtcctg

SEQ ID NO: 46686 - DNA, 22 bp, synthetic construct
  misc_feature 1..22: note = chemically synthesized
  source 1..22: mol_type = other DNA
ttacagggtcctgaggcaatat

SEQ ID NO: 46687 - DNA, 22 bp, synthetic construct
  misc_feature 1..22: note = chemically synthesized
  source 1..22: mol_type = other DNA
cagggtcctgaggcaatataca

SEQ ID NO: 46688 - DNA, 22 bp, synthetic construct
  misc_feature 1..22: note = chemically synthesized
  source 1..22: mol_type = other DNA
aggcaatatacatcctcctcag

SEQ ID NO: 46689 - DNA, 22 bp, synthetic construct
  misc_feature 1..22: note = chemically synthesized
  source 1..22: mol_type = other DNA
ctcagctgacaggattaagaga

SEQ ID NO: 46690 - DNA, 22 bp, synthetic construct
  misc_feature 1..22: note = chemically synthesized
  source 1..22: mol_type = other DNA
agctgacaggattaagagatta

SEQ ID NO: 46691 - DNA, 22 bp, synthetic construct
  misc_feature 1..22: note = chemically synthesized
  source 1..22: mol_type = other DNA
acaggattaagagattaaagta

SEQ ID NO: 46692 - DNA, 22 bp, synthetic construct
  misc_feature 1..22: note = chemically synthesized
  source 1..22: mol_type = other DNA
agagattaaagtaaagacaggc

SEQ ID NO: 46693 - DNA, 22 bp, synthetic construct
  misc_feature 1..22: note = chemically synthesized
  source 1..22: mol_type = other DNA
aagtaaagacaggcataaatca

SEQ ID NO: 46694 - DNA, 22 bp, synthetic construct
  misc_feature 1..22: note = chemically synthesized
  source 1..22: mol_type = other DNA
actggggaagtgataagtgtcc

SEQ ID NO: 46695 - DNA, 22 bp, synthetic construct
  misc_feature 1..22: note = chemically synthesized
  source 1..22: mol_type = other DNA
gggaagtgataagtgtccatga

SEQ ID NO: 46696 - DNA, 22 bp, synthetic construct
  misc_feature 1..22: note = chemically synthesized
  source 1..22: mol_type = other DNA
tacaatttatgtttagagattg

SEQ ID NO: 46697 - DNA, 22 bp, synthetic construct
  misc_feature 1..22: note = chemically synthesized
  source 1..22: mol_type = other DNA
acaatttatgtttagagattgc

SEQ ID NO: 46698 - DNA, 22 bp, synthetic construct
  misc_feature 1..22: note = chemically synthesized
  source 1..22: mol_type = other DNA
caatttatgtttagagattgca

SEQ ID NO: 46699 - DNA, 22 bp, synthetic construct
  misc_feature 1..22: note = chemically synthesized
  source 1..22: mol_type = other DNA
atgtttagagattgcagtaaag

SEQ ID NO: 46700 - DNA, 22 bp, synthetic construct
  misc_feature 1..22: note = chemically synthesized
  source 1..22: mol_type = other DNA
tgtttagagattgcagtaaaga

SEQ ID NO: 46701 - DNA, 22 bp, synthetic construct
  misc_feature 1..22: note = chemically synthesized
  source 1..22: mol_type = other DNA
agagattgcagtaaagacaggc

SEQ ID NO: 46702 - DNA, 22 bp, synthetic construct
  misc_feature 1..22: note = chemically synthesized
  source 1..22: mol_type = other DNA
gagattgcagtaaagacaggca

SEQ ID NO: 46703 - DNA, 22 bp, synthetic construct
  misc_feature 1..22: note = chemically synthesized
  source 1..22: mol_type = other DNA
cagtaaagacaggcataagaaa

SEQ ID NO: 46704 - DNA, 22 bp, synthetic construct
  misc_feature 1..22: note = chemically synthesized
  source 1..22: mol_type = other DNA
caaaagtattaatttggggaac

SEQ ID NO: 46705 - DNA, 22 bp, synthetic construct
  misc_feature 1..22: note = chemically synthesized
  source 1..22: mol_type = other DNA
atttggggaactaataaatgtc

SEQ ID NO: 46706 - DNA, 22 bp, synthetic construct
  misc_feature 1..22: note = chemically synthesized
  source 1..22: mol_type = other DNA
ggggaactaataaatgtccatg

SEQ ID NO: 46707 - DNA, 22 bp, synthetic construct
  misc_feature 1..22: note = chemically synthesized
  source 1..22: mol_type = other DNA
gggaactaataaatgtccatga

SEQ ID NO: 46708 - DNA, 22 bp, synthetic construct
  misc_feature 1..22: note = chemically synthesized
  source 1..22: mol_type = other DNA
ataaatgtccatgaaatcttca

SEQ ID NO: 46709 - DNA, 22 bp, synthetic construct
  misc_feature 1..22: note = chemically synthesized
  source 1..22: mol_type = other DNA
cacaatccacgaacttctgcca

SEQ ID NO: 46710 - DNA, 22 bp, synthetic construct
  misc_feature 1..22: note = chemically synthesized
  source 1..22: mol_type = other DNA
acaatccacgaacttctgccat

SEQ ID NO: 46711 - DNA, 22 bp, synthetic construct
  misc_feature 1..22: note = chemically synthesized
  source 1..22: mol_type = other DNA
ctgccatggcttcagctgatcc

SEQ ID NO: 46712 - DNA, 22 bp, synthetic construct
  misc_feature 1..22: note = chemically synthesized
  source 1..22: mol_type = other DNA
tgccatggcttcagctgatccc

SEQ ID NO: 46713 - DNA, 22 bp, synthetic construct
  misc_feature 1..22: note = chemically synthesized
  source 1..22: mol_type = other DNA
ccatggcttcagctgatccctc

SEQ ID NO: 46714 - DNA, 22 bp, synthetic construct
  misc_feature 1..22: note = chemically synthesized
  source 1..22: mol_type = other DNA
cagctgatccctccgtttggag

SEQ ID NO: 46715 - DNA, 22 bp, synthetic construct
  misc_feature 1..22: note = chemically synthesized
  source 1..22: mol_type = other DNA
agctgatccctccgtttggagt

SEQ ID NO: 46716 - DNA, 22 bp, synthetic construct
  misc_feature 1..22: note = chemically synthesized
  source 1..22: mol_type = other DNA
atccctccgtttggagtcccag

SEQ ID NO: 46717 - DNA, 22 bp, synthetic construct
  misc_feature 1..22: note = chemically synthesized
  source 1..22: mol_type = other DNA
cgtttggagtcccagacttccc

SEQ ID NO: 46718 - DNA, 22 bp, synthetic construct
  misc_feature 1..22: note = chemically synthesized
  source 1..22: mol_type = other DNA
ggagtcccagacttcccgcaac

SEQ ID NO: 46719 - DNA, 22 bp, synthetic construct
  misc_feature 1..22: note = chemically synthesized
  source 1..22: mol_type = other DNA
gagtcccagacttcccgcaaca

SEQ ID NO: 46720 - DNA, 22 bp, synthetic construct
  misc_feature 1..22: note = chemically synthesized
  source 1..22: mol_type = other DNA
cccgcaacaactgagaactctg

SEQ ID NO: 46721 - DNA, 22 bp, synthetic construct
  misc_feature 1..22: note = chemically synthesized
  source 1..22: mol_type = other DNA
ccgcaacaactgagaactctgg

SEQ ID NO: 46722 - DNA, 22 bp, synthetic construct
  misc_feature 1..22: note = chemically synthesized
  source 1..22: mol_type = other DNA
agaactctggagggcctaccct

SEQ ID NO: 46723 - DNA, 22 bp, synthetic construct
  misc_feature 1..22: note = chemically synthesized
  source 1..22: mol_type = other DNA
tggagggcctacccttcaccca

SEQ ID NO: 46724 - DNA, 22 bp, synthetic construct
  misc_feature 1..22: note = chemically synthesized
  source 1..22: mol_type = other DNA
gagggcctacccttcacccact

SEQ ID NO: 46725 - DNA, 22 bp, synthetic construct
  misc_feature 1..22: note = chemically synthesized
  source 1..22: mol_type = other DNA
cccttcacccacttccaccctt

SEQ ID NO: 46726 - DNA, 22 bp, synthetic construct
  misc_feature 1..22: note = chemically synthesized
  source 1..22: mol_type = other DNA
cacccacttccacccttcttat

SEQ ID NO: 46727 - DNA, 22 bp, synthetic construct
  misc_feature 1..22: note = chemically synthesized
  source 1..22: mol_type = other DNA
acccacttccacccttcttata

SEQ ID NO: 46728 - DNA, 22 bp, synthetic construct
  misc_feature 1..22: note = chemically synthesized
  source 1..22: mol_type = other DNA
ccacccttcttatatctcttaa

SEQ ID NO: 46729 - DNA, 22 bp, synthetic construct
  misc_feature 1..22: note = chemically synthesized
  source 1..22: mol_type = other DNA
cacccttcttatatctcttaag

SEQ ID NO: 46730 - DNA, 22 bp, synthetic construct
  misc_feature 1..22: note = chemically synthesized
  source 1..22: mol_type = other DNA
cttatatctcttaaggagctgt

SEQ ID NO: 46731 - DNA, 22 bp, synthetic construct
  misc_feature 1..22: note = chemically synthesized
  source 1..22: mol_type = other DNA
ttatatctcttaaggagctgtg

SEQ ID NO: 46732 - DNA, 22 bp, synthetic construct
  misc_feature 1..22: note = chemically synthesized
  source 1..22: mol_type = other DNA
atatctcttaaggagctgtgtt

SEQ ID NO: 46733 - DNA, 22 bp, synthetic construct
  misc_feature 1..22: note = chemically synthesized
  source 1..22: mol_type = other DNA
tatctcttaaggagctgtgttc

SEQ ID NO: 46734 - DNA, 22 bp, synthetic construct
  misc_feature 1..22: note = chemically synthesized
  source 1..22: mol_type = other DNA
ttaaggagctgtgttcagatgg

SEQ ID NO: 46735 - DNA, 22 bp, synthetic construct
  misc_feature 1..22: note = chemically synthesized
  source 1..22: mol_type = other DNA
aaggagctgtgttcagatggtt

SEQ ID NO: 46736 - DNA, 22 bp, synthetic construct
  misc_feature 1..22: note = chemically synthesized
  source 1..22: mol_type = other DNA
aggagctgtgttcagatggtta

SEQ ID NO: 46737 - DNA, 22 bp, synthetic construct
  misc_feature 1..22: note = chemically synthesized
  source 1..22: mol_type = other DNA
tgttcagatggttacatttcgc

SEQ ID NO: 46738 - DNA, 22 bp, synthetic construct
  misc_feature 1..22: note = chemically synthesized
  source 1..22: mol_type = other DNA
agatggttacatttcgcttgct

SEQ ID NO: 46739 - DNA, 22 bp, synthetic construct
  misc_feature 1..22: note = chemically synthesized
  source 1..22: mol_type = other DNA
catttcgcttgctgagcaagac

SEQ ID NO: 46740 - DNA, 22 bp, synthetic construct
  misc_feature 1..22: note = chemically synthesized
  source 1..22: mol_type = other DNA
cgcttgctgagcaagactgcat

SEQ ID NO: 46741 - DNA, 22 bp, synthetic construct
  misc_feature 1..22: note = chemically synthesized
  source 1..22: mol_type = other DNA
gcttgctgagcaagactgcatt

SEQ ID NO: 46742 - DNA, 22 bp, synthetic construct
  misc_feature 1..22: note = chemically synthesized
  source 1..22: mol_type = other DNA
gctgagcaagactgcattttca

SEQ ID NO: 46743 - DNA, 22 bp, synthetic construct
  misc_feature 1..22: note = chemically synthesized
  source 1..22: mol_type = other DNA
ctgagcaagactgcattttcat

SEQ ID NO: 46744 - DNA, 22 bp, synthetic construct
  misc_feature 1..22: note = chemically synthesized
  source 1..22: mol_type = other DNA
agcaagactgcattttcattat

SEQ ID NO: 46745 - DNA, 22 bp, synthetic construct
  misc_feature 1..22: note = chemically synthesized
  source 1..22: mol_type = other DNA
cattttcattatcctgggctaa

SEQ ID NO: 46746 - DNA, 22 bp, synthetic construct
  misc_feature 1..22: note = chemically synthesized
  source 1..22: mol_type = other DNA
tcattatcctgggctaaaatca

SEQ ID NO: 46747 - DNA, 22 bp, synthetic construct
  misc_feature 1..22: note = chemically synthesized
  source 1..22: mol_type = other DNA
cattatcctgggctaaaatcaa

SEQ ID NO: 46748 - DNA, 22 bp, synthetic construct
  misc_feature 1..22: note = chemically synthesized
  source 1..22: mol_type = other DNA
attatcctgggctaaaatcaat

SEQ ID NO: 46749 - DNA, 22 bp, synthetic construct
  misc_feature 1..22: note = chemically synthesized
  source 1..22: mol_type = other DNA
tcctgggctaaaatcaattggt

SEQ ID NO: 46750 - DNA, 22 bp, synthetic construct
  misc_feature 1..22: note = chemically synthesized
  source 1..22: mol_type = other DNA
ggctaaaatcaattggtattta

SEQ ID NO: 46751 - DNA, 22 bp, synthetic construct
  misc_feature 1..22: note = chemically synthesized
  source 1..22: mol_type = other DNA
aaatcaattggtatttaagtta

SEQ ID NO: 46752 - DNA, 22 bp, synthetic construct
  misc_feature 1..22: note = chemically synthesized
  source 1..22: mol_type = other DNA
gtatttaagttagagcaaaaag

SEQ ID NO: 46753 - DNA, 22 bp, synthetic construct
  misc_feature 1..22: note = chemically synthesized
  source 1..22: mol_type = other DNA
aagttagagcaaaaagggttct

SEQ ID NO: 46754 - DNA, 22 bp, synthetic construct
  misc_feature 1..22: note = chemically synthesized
  source 1..22: mol_type = other DNA
agttagagcaaaaagggttcta

SEQ ID NO: 46755 - DNA, 22 bp, synthetic construct
  misc_feature 1..22: note = chemically synthesized
  source 1..22: mol_type = other DNA
gagcaaaaagggttctaaccct

SEQ ID NO: 46756 - DNA, 22 bp, synthetic construct
  misc_feature 1..22: note = chemically synthesized
  source 1..22: mol_type = other DNA
taaccctatttacagcagcaca

SEQ ID NO: 46757 - DNA, 22 bp, synthetic construct
  misc_feature 1..22: note = chemically synthesized
  source 1..22: mol_type = other DNA
accctatttacagcagcacaca

SEQ ID NO: 46758 - DNA, 22 bp, synthetic construct
  misc_feature 1..22: note = chemically synthesized
  source 1..22: mol_type = other DNA
tttacagcagcacacatacact

SEQ ID NO: 46759 - DNA, 22 bp, synthetic construct
  misc_feature 1..22: note = chemically synthesized
  source 1..22: mol_type = other DNA
acagcagcacacatacacttac

SEQ ID NO: 46760 - DNA, 22 bp, synthetic construct
  misc_feature 1..22: note = chemically synthesized
  source 1..22: mol_type = other DNA
cagcagcacacatacacttaca

SEQ ID NO: 46761 - DNA, 22 bp, synthetic construct
  misc_feature 1..22: note = chemically synthesized
  source 1..22: mol_type = other DNA
acattagaattggctttaaggg

SEQ ID NO: 46762 - DNA, 22 bp, synthetic construct
  misc_feature 1..22: note = chemically synthesized
  source 1..22: mol_type = other DNA
cattagaattggctttaaggga

SEQ ID NO: 46763 - DNA, 22 bp, synthetic construct
  misc_feature 1..22: note = chemically synthesized
  source 1..22: mol_type = other DNA
gaattggctttaagggaaaaat

SEQ ID NO: 46764 - DNA, 22 bp, synthetic construct
  misc_feature 1..22: note = chemically synthesized
  source 1..22: mol_type = other DNA
gctttaagggaaaaattcaatc

SEQ ID NO: 46765 - DNA, 22 bp, synthetic construct
  misc_feature 1..22: note = chemically synthesized
  source 1..22: mol_type = other DNA
taagggaaaaattcaatcaatc

SEQ ID NO: 46766 - DNA, 22 bp, synthetic construct
  misc_feature 1..22: note = chemically synthesized
  source 1..22: mol_type = other DNA
aagggaaaaattcaatcaatcg

SEQ ID NO: 46767 - DNA, 22 bp, synthetic construct
  misc_feature 1..22: note = chemically synthesized
  source 1..22: mol_type = other DNA
agggaaaaattcaatcaatcga

SEQ ID NO: 46768 - DNA, 22 bp, synthetic construct
  misc_feature 1..22: note = chemically synthesized
  source 1..22: mol_type = other DNA
aatcaatcgacaaatttccact

SEQ ID NO: 46769 - DNA, 22 bp, synthetic construct
  misc_feature 1..22: note = chemically synthesized
  source 1..22: mol_type = other DNA
ccactgattaccttctatgagc

SEQ ID NO: 46770 - DNA, 22 bp, synthetic construct
  misc_feature 1..22: note = chemically synthesized
  source 1..22: mol_type = other DNA
cactgattaccttctatgagcc

SEQ ID NO: 46771 - DNA, 22 bp, synthetic construct
  misc_feature 1..22: note = chemically synthesized
  source 1..22: mol_type = other DNA
attaccttctatgagccaagac

SEQ ID NO: 46772 - DNA, 22 bp, synthetic construct
  misc_feature 1..22: note = chemically synthesized
  source 1..22: mol_type = other DNA
ccttctatgagccaagactgcc

SEQ ID NO: 46773 - DNA, 22 bp, synthetic construct
  misc_feature 1..22: note = chemically synthesized
  source 1..22: mol_type = other DNA
ctatgagccaagactgccatag

SEQ ID NO: 46774 - DNA, 22 bp, synthetic construct
  misc_feature 1..22: note = chemically synthesized
  source 1..22: mol_type = other DNA
tatgagccaagactgccatagt

SEQ ID NO: 46775 - DNA, 22 bp, synthetic construct
  misc_feature 1..22: note = chemically synthesized
  source 1..22: mol_type = other DNA
tgagccaagactgccatagtct

SEQ ID NO: 46776 - DNA, 22 bp, synthetic construct
  misc_feature 1..22: note = chemically synthesized
  source 1..22: mol_type = other DNA
ccatagtctcagccttcatgca

SEQ ID NO: 46777 - DNA, 22 bp, synthetic construct
  misc_feature 1..22: note = chemically synthesized
  source 1..22: mol_type = other DNA
agccttcatgcagcttataggc

SEQ ID NO: 46778 - DNA, 22 bp, synthetic construct
  misc_feature 1..22: note = chemically synthesized
  source 1..22: mol_type = other DNA
catgcagcttataggctagcaa

SEQ ID NO: 46779 - DNA, 22 bp, synthetic construct
  misc_feature 1..22: note = chemically synthesized
  source 1..22: mol_type = other DNA
atgcagcttataggctagcaaa

SEQ ID NO: 46780 - DNA, 22 bp, synthetic construct
  misc_feature 1..22: note = chemically synthesized
  source 1..22: mol_type = other DNA
ataggctagcaaaaaagccaga

SEQ ID NO: 46781 - DNA, 22 bp, synthetic construct
  misc_feature 1..22: note = chemically synthesized
  source 1..22: mol_type = other DNA
taggctagcaaaaaagccagac

SEQ ID NO: 46782 - DNA, 22 bp, synthetic construct
  misc_feature 1..22: note = chemically synthesized
  source 1..22: mol_type = other DNA
gcaaaaaagccagacagtgcac

SEQ ID NO: 46783 - DNA, 22 bp, synthetic construct
  misc_feature 1..22: note = chemically synthesized
  source 1..22: mol_type = other DNA
acaagtgtgttgagtgttgcaa

SEQ ID NO: 46784 - DNA, 22 bp, synthetic construct
  misc_feature 1..22: note = chemically synthesized
  source 1..22: mol_type = other DNA
agtgttgcaagagtaagtttca

SEQ ID NO: 46785 - DNA, 22 bp, synthetic construct
  misc_feature 1..22: note = chemically synthesized
  source 1..22: mol_type = other DNA
caagagtaagtttcaggggctc

SEQ ID NO: 46786 - DNA, 22 bp, synthetic construct
  misc_feature 1..22: note = chemically synthesized
  source 1..22: mol_type = other DNA
caggggctctccatgacttacc

SEQ ID NO: 46787 - DNA, 22 bp, synthetic construct
  misc_feature 1..22: note = chemically synthesized
  source 1..22: mol_type = other DNA
aggggctctccatgacttacct

SEQ ID NO: 46788 - DNA, 22 bp, synthetic construct
  misc_feature 1..22: note = chemically synthesized
  source 1..22: mol_type = other DNA
tccatgacttacctggttgaga

SEQ ID NO: 46789 - DNA, 22 bp, synthetic construct
  misc_feature 1..22: note = chemically synthesized
  source 1..22: mol_type = other DNA
catgacttacctggttgagaaa

SEQ ID NO: 46790 - DNA, 22 bp, synthetic construct
  misc_feature 1..22: note = chemically synthesized
  source 1..22: mol_type = other DNA
acctggttgagaaaccctttaa

SEQ ID NO: 46791 - DNA, 22 bp, synthetic construct
  misc_feature 1..22: note = chemically synthesized
  source 1..22: mol_type = other DNA
cctggttgagaaaccctttaac

SEQ ID NO: 46792 - DNA, 22 bp, synthetic construct
  misc_feature 1..22: note = chemically synthesized
  source 1..22: mol_type = other DNA
gttgagaaaccctttaactttt

SEQ ID NO: 46793 - DNA, 22 bp, synthetic construct
  misc_feature 1..22: note = chemically synthesized
  source 1..22: mol_type = other DNA
agaaaccctttaactttttttt

SEQ ID NO: 46794 - DNA, 22 bp, synthetic construct
  misc_feature 1..22: note = chemically synthesized
  source 1..22: mol_type = other DNA
taactttttttttcctctgggt

SEQ ID NO: 46795 - DNA, 22 bp, synthetic construct
  misc_feature 1..22: note = chemically synthesized
  source 1..22: mol_type = other DNA
aactttttttttcctctgggtg

SEQ ID NO: 46796 - DNA, 22 bp, synthetic construct
  misc_feature 1..22: note = chemically synthesized
  source 1..22: mol_type = other DNA
actttttttttcctctgggtgt

SEQ ID NO: 46797 - DNA, 22 bp, synthetic construct
  misc_feature 1..22: note = chemically synthesized
  source 1..22: mol_type = other DNA
tttttttcctctgggtgtaaag

SEQ ID NO: 46798 - DNA, 22 bp, synthetic construct
  misc_feature 1..22: note = chemically synthesized
  source 1..22: mol_type = other DNA
ttttttcctctgggtgtaaagt

SEQ ID NO: 46799 - DNA, 22 bp, synthetic construct
  misc_feature 1..22: note = chemically synthesized
  source 1..22: mol_type = other DNA
tttttcctctgggtgtaaagtg

SEQ ID NO: 46800 - DNA, 22 bp, synthetic construct
  misc_feature 1..22: note = chemically synthesized
  source 1..22: mol_type = other DNA
ttttcctctgggtgtaaagtga

SEQ ID NO: 46801 - DNA, 22 bp, synthetic construct
  misc_feature 1..22: note = chemically synthesized
  source 1..22: mol_type = other DNA
tttcctctgggtgtaaagtgaa

SEQ ID NO: 46802 - DNA, 22 bp, synthetic construct
  misc_feature 1..22: note = chemically synthesized
  source 1..22: mol_type = other DNA
ttcctctgggtgtaaagtgaag

SEQ ID NO: 46803 - DNA, 22 bp, synthetic construct
  misc_feature 1..22: note = chemically synthesized
  source 1..22: mol_type = other DNA
tcctctgggtgtaaagtgaaga

SEQ ID NO: 46804 - DNA, 22 bp, synthetic construct
  misc_feature 1..22: note = chemically synthesized
  source 1..22: mol_type = other DNA
cctctgggtgtaaagtgaagag

SEQ ID NO: 46805 - DNA, 22 bp, synthetic construct
  misc_feature 1..22: note = chemically synthesized
  source 1..22: mol_type = other DNA
ctctgggtgtaaagtgaagaga

SEQ ID NO: 46806 - DNA, 22 bp, synthetic construct
  misc_feature 1..22: note = chemically synthesized
  source 1..22: mol_type = other DNA
tgggtgtaaagtgaagagatgg

SEQ ID NO: 46807 - DNA, 22 bp, synthetic construct
  misc_feature 1..22: note = chemically synthesized
  source 1..22: mol_type = other DNA
ggtgtaaagtgaagagatggca

SEQ ID NO: 46808 - DNA, 22 bp, synthetic construct
  misc_feature 1..22: note = chemically synthesized
  source 1..22: mol_type = other DNA
cattgtgtcattgtgaaaagat

SEQ ID NO: 46809 - DNA, 22 bp, synthetic construct
  misc_feature 1..22: note = chemically synthesized
  source 1..22: mol_type = other DNA
tgtcattgtgaaaagatgctgg

SEQ ID NO: 46810 - DNA, 22 bp, synthetic construct
  misc_feature 1..22: note = chemically synthesized
  source 1..22: mol_type = other DNA
tgaaaagatgctgggctggcgt

SEQ ID NO: 46811 - DNA, 22 bp, synthetic construct
  misc_feature 1..22: note = chemically synthesized
  source 1..22: mol_type = other DNA
ggctggcgtgtctcctgaaggc

SEQ ID NO: 46812 - DNA, 22 bp, synthetic construct
  misc_feature 1..22: note = chemically synthesized
  source 1..22: mol_type = other DNA
gcgtgtctcctgaaggccaccc

SEQ ID NO: 46813 - DNA, 22 bp, synthetic construct
  misc_feature 1..22: note = chemically synthesized
  source 1..22: mol_type = other DNA
ctgaaggccacccatatcttta

SEQ ID NO: 46814 - DNA, 22 bp, synthetic construct
  misc_feature 1..22: note = chemically synthesized
  source 1..22: mol_type = other DNA
aaggccacccatatctttaaac

SEQ ID NO: 46815 - DNA, 22 bp, synthetic construct
  misc_feature 1..22: note = chemically synthesized
  source 1..22: mol_type = other DNA
taaactttattttcatgcattc

SEQ ID NO: 46816 - DNA, 22 bp, synthetic construct
  misc_feature 1..22: note = chemically synthesized
  source 1..22: mol_type = other DNA
aaactttattttcatgcattcg

SEQ ID NO: 46817 - DNA, 22 bp, synthetic construct
  misc_feature 1..22: note = chemically synthesized
  source 1..22: mol_type = other DNA
aactttattttcatgcattcgc

SEQ ID NO: 46818 - DNA, 22 bp, synthetic construct
  misc_feature 1..22: note = chemically synthesized
  source 1..22: mol_type = other DNA
tattttcatgcattcgcacaaa

SEQ ID NO: 46819 - DNA, 22 bp, synthetic construct
  misc_feature 1..22: note = chemically synthesized
  source 1..22: mol_type = other DNA
attttcatgcattcgcacaaat

SEQ ID NO: 46820 - DNA, 22 bp, synthetic construct
  misc_feature 1..22: note = chemically synthesized
  source 1..22: mol_type = other DNA
ttttcatgcattcgcacaaata

SEQ ID NO: 46821 - DNA, 22 bp, synthetic construct
  misc_feature 1..22: note = chemically synthesized
  source 1..22: mol_type = other DNA
tcatgcattcgcacaaatatag

SEQ ID NO: 46822 - DNA, 22 bp, synthetic construct
  misc_feature 1..22: note = chemically synthesized
  source 1..22: mol_type = other DNA
catgcattcgcacaaatataga

SEQ ID NO: 46823 - DNA, 22 bp, synthetic construct
  misc_feature 1..22: note = chemically synthesized
  source 1..22: mol_type = other DNA
atgcattcgcacaaatatagat

SEQ ID NO: 46824 - DNA, 22 bp, synthetic construct
  misc_feature 1..22: note = chemically synthesized
  source 1..22: mol_type = other DNA
gcacaaatatagatgtgttcca

SEQ ID NO: 46825 - DNA, 22 bp, synthetic construct
  misc_feature 1..22: note = chemically synthesized
  source 1..22: mol_type = other DNA
catagatgaggcagatagcaga

SEQ ID NO: 46826 - DNA, 22 bp, synthetic construct
  misc_feature 1..22: note = chemically synthesized
  source 1..22: mol_type = other DNA
ctgcctacagcaaggctagttt

SEQ ID NO: 46827 - DNA, 22 bp, synthetic construct
  misc_feature 1..22: note = chemically synthesized
  source 1..22: mol_type = other DNA
tgcctacagcaaggctagtttg

SEQ ID NO: 46828 - DNA, 22 bp, synthetic construct
  misc_feature 1..22: note = chemically synthesized
  source 1..22: mol_type = other DNA
cctacagcaaggctagtttgga

SEQ ID NO: 46829 - DNA, 22 bp, synthetic construct
  misc_feature 1..22: note = chemically synthesized
  source 1..22: mol_type = other DNA
cagcaaggctagtttggagagg

SEQ ID NO: 46830 - DNA, 22 bp, synthetic construct
  misc_feature 1..22: note = chemically synthesized
  source 1..22: mol_type = other DNA
gtttggagagggttttgctgtc

SEQ ID NO: 46831 - DNA, 22 bp, synthetic construct
  misc_feature 1..22: note = chemically synthesized
  source 1..22: mol_type = other DNA
ggagagggttttgctgtcaggg

SEQ ID NO: 46832 - DNA, 22 bp, synthetic construct
  misc_feature 1..22: note = chemically synthesized
  source 1..22: mol_type = other DNA
gagagggttttgctgtcagggt

SEQ ID NO: 46833 - DNA, 22 bp, synthetic construct
  misc_feature 1..22: note = chemically synthesized
  source 1..22: mol_type = other DNA
tgctgtcagggttggacccaca

SEQ ID NO: 46834 - DNA, 22 bp, synthetic construct
  misc_feature 1..22: note = chemically synthesized
  source 1..22: mol_type = other DNA
gctgtcagggttggacccacac

SEQ ID NO: 46835 - DNA, 22 bp, synthetic construct
  misc_feature 1..22: note = chemically synthesized
  source 1..22: mol_type = other DNA
ctgtcagggttggacccacaca

SEQ ID NO: 46836 - DNA, 22 bp, synthetic construct
  misc_feature 1..22: note = chemically synthesized
  source 1..22: mol_type = other DNA
tcagggttggacccacacacct

SEQ ID NO: 46837 - DNA, 22 bp, synthetic construct
  misc_feature 1..22: note = chemically synthesized
  source 1..22: mol_type = other DNA
gacccacacacctcttcataga

SEQ ID NO: 46838 - DNA, 22 bp, synthetic construct
  misc_feature 1..22: note = chemically synthesized
  source 1..22: mol_type = other DNA
ttcatagatgctttttcttttt

SEQ ID NO: 46839 - DNA, 22 bp, synthetic construct
  misc_feature 1..22: note = chemically synthesized
  source 1..22: mol_type = other DNA
catagatgctttttcttttttt

SEQ ID NO: 46840 - DNA, 22 bp, synthetic construct
  misc_feature 1..22: note = chemically synthesized
  source 1..22: mol_type = other DNA
atagatgctttttctttttttt

SEQ ID NO: 46841 - DNA, 22 bp, synthetic construct
  misc_feature 1..22: note = chemically synthesized
  source 1..22: mol_type = other DNA
tttcttttttttcccagagttt

SEQ ID NO: 46842 - DNA, 22 bp, synthetic construct
  misc_feature 1..22: note = chemically synthesized
  source 1..22: mol_type = other DNA
ttcttttttttcccagagtttg

SEQ ID NO: 46843 - DNA, 22 bp, synthetic construct
  misc_feature 1..22: note = chemically synthesized
  source 1..22: mol_type = other DNA
tcttttttttcccagagtttga

SEQ ID NO: 46844 - DNA, 22 bp, synthetic construct
  misc_feature 1..22: note = chemically synthesized
  source 1..22: mol_type = other DNA
cttttttttcccagagtttgaa

SEQ ID NO: 46845 - DNA, 22 bp, synthetic construct
  misc_feature 1..22: note = chemically synthesized
  source 1..22: mol_type = other DNA
ttttttttcccagagtttgaaa

SEQ ID NO: 46846 - DNA, 22 bp, synthetic construct
  misc_feature 1..22: note = chemically synthesized
  source 1..22: mol_type = other DNA
ttttttcccagagtttgaaagg

SEQ ID NO: 46847 - DNA, 22 bp, synthetic construct
  misc_feature 1..22: note = chemically synthesized
  source 1..22: mol_type = other DNA
tttttcccagagtttgaaaggg

SEQ ID NO: 46848 - DNA, 22 bp, synthetic construct
  misc_feature 1..22: note = chemically synthesized
  source 1..22: mol_type = other DNA
ttttcccagagtttgaaaggga

SEQ ID NO: 46849 - DNA, 22 bp, synthetic construct
  misc_feature 1..22: note = chemically synthesized
  source 1..22: mol_type = other DNA
tttcccagagtttgaaagggaa

SEQ ID NO: 46850 - DNA, 22 bp, synthetic construct
  misc_feature 1..22: note = chemically synthesized
  source 1..22: mol_type = other DNA
ttcccagagtttgaaagggaaa

SEQ ID NO: 46851 - DNA, 22 bp, synthetic construct
  misc_feature 1..22: note = chemically synthesized
  source 1..22: mol_type = other DNA
tcccagagtttgaaagggaaat

SEQ ID NO: 46852 - DNA, 22 bp, synthetic construct
  misc_feature 1..22: note = chemically synthesized
  source 1..22: mol_type = other DNA
cccagagtttgaaagggaaatg

SEQ ID NO: 46853 - DNA, 22 bp, synthetic construct
  misc_feature 1..22: note = chemically synthesized
  source 1..22: mol_type = other DNA
ccagagtttgaaagggaaatgg

SEQ ID NO: 46854 - DNA, 22 bp, synthetic construct
  misc_feature 1..22: note = chemically synthesized
  source 1..22: mol_type = other DNA
gaaagggaaatggagtctcaag

SEQ ID NO: 46855 - DNA, 22 bp, synthetic construct
  misc_feature 1..22: note = chemically synthesized
  source 1..22: mol_type = other DNA
aaagggaaatggagtctcaagt

SEQ ID NO: 46856 - DNA, 22 bp, synthetic construct
  misc_feature 1..22: note = chemically synthesized
  source 1..22: mol_type = other DNA
aagttcagggaggttacagtgt

SEQ ID NO: 46857 - DNA, 22 bp, synthetic construct
  misc_feature 1..22: note = chemically synthesized
  source 1..22: mol_type = other DNA
agggaggttacagtgtagaccc

SEQ ID NO: 46858 - DNA, 22 bp, synthetic construct
  misc_feature 1..22: note = chemically synthesized
  source 1..22: mol_type = other DNA
cagtgtagacccacaaatcagc

SEQ ID NO: 46859 - DNA, 22 bp, synthetic construct
  misc_feature 1..22: note = chemically synthesized
  source 1..22: mol_type = other DNA
agtacagctaagggtggagaag

SEQ ID NO: 46860 - DNA, 22 bp, synthetic construct
  misc_feature 1..22: note = chemically synthesized
  source 1..22: mol_type = other DNA
agggtggagaagtctatgcaat

SEQ ID NO: 46861 - DNA, 22 bp, synthetic construct
  misc_feature 1..22: note = chemically synthesized
  source 1..22: mol_type = other DNA
tgcaatatccagcactcttctg

SEQ ID NO: 46862 - DNA, 22 bp, synthetic construct
  misc_feature 1..22: note = chemically synthesized
  source 1..22: mol_type = other DNA
ttctgattaattagaagtcttt

SEQ ID NO: 46863 - DNA, 22 bp, synthetic construct
  misc_feature 1..22: note = chemically synthesized
  source 1..22: mol_type = other DNA
ctgattaattagaagtctttaa

SEQ ID NO: 46864 - DNA, 22 bp, synthetic construct
  misc_feature 1..22: note = chemically synthesized
  source 1..22: mol_type = other DNA
tgattaattagaagtctttaaa

SEQ ID NO: 46865 - DNA, 22 bp, synthetic construct
  misc_feature 1..22: note = chemically synthesized
  source 1..22: mol_type = other DNA
attaattagaagtctttaaaat

SEQ ID NO: 46866 - DNA, 22 bp, synthetic construct
  misc_feature 1..22: note = chemically synthesized
  source 1..22: mol_type = other DNA
attagaagtctttaaaattcac

SEQ ID NO: 46867 - DNA, 22 bp, synthetic construct
  misc_feature 1..22: note = chemically synthesized
  source 1..22: mol_type = other DNA
gaagtctttaaaattcacagaa

SEQ ID NO: 46868 - DNA, 22 bp, synthetic construct
  misc_feature 1..22: note = chemically synthesized
  source 1..22: mol_type = other DNA
taaaattcacagaaaccatatt

SEQ ID NO: 46869 - DNA, 22 bp, synthetic construct
  misc_feature 1..22: note = chemically synthesized
  source 1..22: mol_type = other DNA
aaaattcacagaaaccatattg

SEQ ID NO: 46870 - DNA, 22 bp, synthetic construct
  misc_feature 1..22: note = chemically synthesized
  source 1..22: mol_type = other DNA
aaattcacagaaaccatattgt

SEQ ID NO: 46871 - DNA, 22 bp, synthetic construct
  misc_feature 1..22: note = chemically synthesized
  source 1..22: mol_type = other DNA
acagaaaccatattgtcttccc

SEQ ID NO: 46872 - DNA, 22 bp, synthetic construct
  misc_feature 1..22: note = chemically synthesized
  source 1..22: mol_type = other DNA
tcttccctaaatgattcatatg

SEQ ID NO: 46873 - DNA, 22 bp, synthetic construct
  misc_feature 1..22: note = chemically synthesized
  source 1..22: mol_type = other DNA
ccctaaatgattcatatgtcaa

SEQ ID NO: 46874 - DNA, 22 bp, synthetic construct
  misc_feature 1..22: note = chemically synthesized
  source 1..22: mol_type = other DNA
cctaaatgattcatatgtcaag

SEQ ID NO: 46875 - DNA, 22 bp, synthetic construct
  misc_feature 1..22: note = chemically synthesized
  source 1..22: mol_type = other DNA
aatgattcatatgtcaagacac

SEQ ID NO: 46876 - DNA, 22 bp, synthetic construct
  misc_feature 1..22: note = chemically synthesized
  source 1..22: mol_type = other DNA
atatgtcaagacacagtaaaga

SEQ ID NO: 46877 - DNA, 22 bp, synthetic construct
  misc_feature 1..22: note = chemically synthesized
  source 1..22: mol_type = other DNA
tatgtggaacatcatacacaaa

SEQ ID NO: 46878 - DNA, 22 bp, synthetic construct
  misc_feature 1..22: note = chemically synthesized
  source 1..22: mol_type = other DNA
ttaccttagtaaactgccaatt

SEQ ID NO: 46879 - DNA, 22 bp, synthetic construct
  misc_feature 1..22: note = chemically synthesized
  source 1..22: mol_type = other DNA
accttagtaaactgccaatttt

SEQ ID NO: 46880 - DNA, 22 bp, synthetic construct
  misc_feature 1..22: note = chemically synthesized
  source 1..22: mol_type = other DNA
ccttagtaaactgccaattttc

SEQ ID NO: 46881 - DNA, 22 bp, synthetic construct
  misc_feature 1..22: note = chemically synthesized
  source 1..22: mol_type = other DNA
agtaaactgccaattttctgaa

SEQ ID NO: 46882 - DNA, 22 bp, synthetic construct
  misc_feature 1..22: note = chemically synthesized
  source 1..22: mol_type = other DNA
gtaaactgccaattttctgaaa

SEQ ID NO: 46883 - DNA, 22 bp, synthetic construct
  misc_feature 1..22: note = chemically synthesized
  source 1..22: mol_type = other DNA
ccaattttctgaaatgctcttt

SEQ ID NO: 46884 - DNA, 22 bp, synthetic construct
  misc_feature 1..22: note = chemically synthesized
  source 1..22: mol_type = other DNA
tctgaaatgctctttaaatcct

SEQ ID NO: 46885 - DNA, 22 bp, synthetic construct
  misc_feature 1..22: note = chemically synthesized
  source 1..22: mol_type = other DNA
ctgaaatgctctttaaatcctg

SEQ ID NO: 46886 - DNA, 22 bp, synthetic construct
  misc_feature 1..22: note = chemically synthesized
  source 1..22: mol_type = other DNA
tgaaatgctctttaaatcctgc

SEQ ID NO: 46887 - DNA, 22 bp, synthetic construct
  misc_feature 1..22: note = chemically synthesized
  source 1..22: mol_type = other DNA
aaatgctctttaaatcctgcta

SEQ ID NO: 46888 - DNA, 22 bp, synthetic construct
  misc_feature 1..22: note = chemically synthesized
  source 1..22: mol_type = other DNA
tttaaatcctgctaatggtggc

SEQ ID NO: 46889 - DNA, 22 bp, synthetic construct
  misc_feature 1..22: note = chemically synthesized
  source 1..22: mol_type = other DNA
taaatcctgctaatggtggcat

SEQ ID NO: 46890 - DNA, 22 bp, synthetic construct
  misc_feature 1..22: note = chemically synthesized
  source 1..22: mol_type = other DNA
aaatcctgctaatggtggcatt

SEQ ID NO: 46891 - DNA, 22 bp, synthetic construct
  misc_feature 1..22: note = chemically synthesized
  source 1..22: mol_type = other DNA
aatcctgctaatggtggcattt

SEQ ID NO: 46892 - DNA, 22 bp, synthetic construct
  misc_feature 1..22: note = chemically synthesized
  source 1..22: mol_type = other DNA
ctaatggtggcatttgtgtctt

SEQ ID NO: 46893 - DNA, 22 bp, synthetic construct
  misc_feature 1..22: note = chemically synthesized
  source 1..22: mol_type = other DNA
atggtggcatttgtgtctttgt

SEQ ID NO: 46894 - DNA, 22 bp, synthetic construct
  misc_feature 1..22: note = chemically synthesized
  source 1..22: mol_type = other DNA
gtgtctttgtcacctacagtac

SEQ ID NO: 46895 - DNA, 22 bp, synthetic construct
  misc_feature 1..22: note = chemically synthesized
  source 1..22: mol_type = other DNA
tgtctttgtcacctacagtaca

SEQ ID NO: 46896 - DNA, 22 bp, synthetic construct
  misc_feature 1..22: note = chemically synthesized
  source 1..22: mol_type = other DNA
tgtcacctacagtacatttctg

SEQ ID NO: 46897 - DNA, 22 bp, synthetic construct
  misc_feature 1..22: note = chemically synthesized
  source 1..22: mol_type = other DNA
gtcacctacagtacatttctgg

SEQ ID NO: 46898 - DNA, 22 bp, synthetic construct
  misc_feature 1..22: note = chemically synthesized
  source 1..22: mol_type = other DNA
tcacctacagtacatttctgga

SEQ ID NO: 46899 - DNA, 22 bp, synthetic construct
  misc_feature 1..22: note = chemically synthesized
  source 1..22: mol_type = other DNA
cagtacatttctggatttggga

SEQ ID NO: 46900 - DNA, 22 bp, synthetic construct
  misc_feature 1..22: note = chemically synthesized
  source 1..22: mol_type = other DNA
ctggatttgggaatgagtgttc

SEQ ID NO: 46901 - DNA, 22 bp, synthetic construct
  misc_feature 1..22: note = chemically synthesized
  source 1..22: mol_type = other DNA
tggatttgggaatgagtgttct

SEQ ID NO: 46902 - DNA, 22 bp, synthetic construct
  misc_feature 1..22: note = chemically synthesized
  source 1..22: mol_type = other DNA
gatttgggaatgagtgttcttc

SEQ ID NO: 46903 - DNA, 22 bp, synthetic construct
  misc_feature 1..22: note = chemically synthesized
  source 1..22: mol_type = other DNA
gggaatgagtgttcttcagagg

SEQ ID NO: 46904 - DNA, 22 bp, synthetic construct
  misc_feature 1..22: note = chemically synthesized
  source 1..22: mol_type = other DNA
ggaatgagtgttcttcagagga

SEQ ID NO: 46905 - DNA, 22 bp, synthetic construct
  misc_feature 1..22: note = chemically synthesized
  source 1..22: mol_type = other DNA
ttcagaggatcctcgctgccca

SEQ ID NO: 46906 - DNA, 22 bp, synthetic construct
  misc_feature 1..22: note = chemically synthesized
  source 1..22: mol_type = other DNA
cagaggatcctcgctgcccagg

SEQ ID NO: 46907 - DNA, 22 bp, synthetic construct
  misc_feature 1..22: note = chemically synthesized
  source 1..22: mol_type = other DNA
agaggatcctcgctgcccaggt

SEQ ID NO: 46908 - DNA, 22 bp, synthetic construct
  misc_feature 1..22: note = chemically synthesized
  source 1..22: mol_type = other DNA
gctgcccaggttccctgccaga

SEQ ID NO: 46909 - DNA, 22 bp, synthetic construct
  misc_feature 1..22: note = chemically synthesized
  source 1..22: mol_type = other DNA
cccaggttccctgccagaagga

SEQ ID NO: 46910 - DNA, 20 bp, synthetic construct
  misc_feature 1..20: note = chemically synthesized
  source 1..20: mol_type = other DNA
ctccttttgccacaccctca

SEQ ID NO: 46911 - DNA, 20 bp, synthetic construct
  misc_feature 1..20: note = chemically synthesized
  source 1..20: mol_type = other DNA
acaccctcacagacataacc

SEQ ID NO: 46912 - DNA, 20 bp, synthetic construct
  misc_feature 1..20: note = chemically synthesized
  source 1..20: mol_type = other DNA
ttgcatctttcaatccaatc

SEQ ID NO: 46913 - DNA, 20 bp, synthetic construct
  misc_feature 1..20: note = chemically synthesized
  source 1..20: mol_type = other DNA
tttcaatccaatcaagttga

SEQ ID NO: 46914 - DNA, 20 bp, synthetic construct
  misc_feature 1..20: note = chemically synthesized
  source 1..20: mol_type = other DNA
ttgacagtattaaccatcac

SEQ ID NO: 46915 - DNA, 20 bp, synthetic construct
  misc_feature 1..20: note = chemically synthesized
  source 1..20: mol_type = other DNA
tcatacataatcttcaaata

SEQ ID NO: 46916 - DNA, 20 bp, synthetic construct
  misc_feature 1..20: note = chemically synthesized
  source 1..20: mol_type = other DNA
cttcaaataaagacaataat

SEQ ID NO: 46917 - DNA, 20 bp, synthetic construct
  misc_feature 1..20: note = chemically synthesized
  source 1..20: mol_type = other DNA
ttcaaataaagacaataata

SEQ ID NO: 46918 - DNA, 20 bp, synthetic construct
  misc_feature 1..20: note = chemically synthesized
  source 1..20: mol_type = other DNA
tacaactatcctcatacaac

SEQ ID NO: 46919 - DNA, 20 bp, synthetic construct
  misc_feature 1..20: note = chemically synthesized
  source 1..20: mol_type = other DNA
cgcaccaatccccaaaccaa

SEQ ID NO: 46920 - DNA, 20 bp, synthetic construct
  misc_feature 1..20: note = chemically synthesized
  source 1..20: mol_type = other DNA
caaaccaaaagttattacat

SEQ ID NO: 46921 - DNA, 20 bp, synthetic construct
  misc_feature 1..20: note = chemically synthesized
  source 1..20: mol_type = other DNA
aaaccaaaagttattacata

SEQ ID NO: 46922 - DNA, 20 bp, synthetic construct
  misc_feature 1..20: note = chemically synthesized
  source 1..20: mol_type = other DNA
aatgcttaaatgctgatgtg

SEQ ID NO: 46923 - DNA, 20 bp, synthetic construct
  misc_feature 1..20: note = chemically synthesized
  source 1..20: mol_type = other DNA
gatgtgaagtccataaatct

SEQ ID NO: 46924 - DNA, 20 bp, synthetic construct
  misc_feature 1..20: note = chemically synthesized
  source 1..20: mol_type = other DNA
atgtgaagtccataaatcta

SEQ ID NO: 46925 - DNA, 20 bp, synthetic construct
  misc_feature 1..20: note = chemically synthesized
  source 1..20: mol_type = other DNA
aaatctaaggtcacatgata

SEQ ID NO: 46926 - DNA, 20 bp, synthetic construct
  misc_feature 1..20: note = chemically synthesized
  source 1..20: mol_type = other DNA
aatctaaggtcacatgataa

SEQ ID NO: 46927 - DNA, 20 bp, synthetic construct
  misc_feature 1..20: note = chemically synthesized
  source 1..20: mol_type = other DNA
cacatgataaaggaaaaata

SEQ ID NO: 46928 - DNA, 20 bp, synthetic construct
  misc_feature 1..20: note = chemically synthesized
  source 1..20: mol_type = other DNA
acatgataaaggaaaaataa

SEQ ID NO: 46929 - DNA, 20 bp, synthetic construct
  misc_feature 1..20: note = chemically synthesized
  source 1..20: mol_type = other DNA
aaaataaaggaaataaaata

SEQ ID NO: 46930 - DNA, 20 bp, synthetic construct
  misc_feature 1..20: note = chemically synthesized
  source 1..20: mol_type = other DNA
ataaaataaagatattttct

SEQ ID NO: 46931 - DNA, 20 bp, synthetic construct
  misc_feature 1..20: note = chemically synthesized
  source 1..20: mol_type = other DNA
taaagatattttcttagcac

SEQ ID NO: 46932 - DNA, 20 bp, synthetic construct
  misc_feature 1..20: note = chemically synthesized
  source 1..20: mol_type = other DNA
cacaagtgtacacatgcatt

SEQ ID NO: 46933 - DNA, 20 bp, synthetic construct
  misc_feature 1..20: note = chemically synthesized
  source 1..20: mol_type = other DNA
agtgtacacatgcatttaga

SEQ ID NO: 46934 - DNA, 20 bp, synthetic construct
  misc_feature 1..20: note = chemically synthesized
  source 1..20: mol_type = other DNA
gtacacatgcatttagaaag

SEQ ID NO: 46935 - DNA, 20 bp, synthetic construct
  misc_feature 1..20: note = chemically synthesized
  source 1..20: mol_type = other DNA
atgcatttagaaagtggata

SEQ ID NO: 46936 - DNA, 20 bp, synthetic construct
  misc_feature 1..20: note = chemically synthesized
  source 1..20: mol_type = other DNA
agaaagtggatatagtgctg

SEQ ID NO: 46937 - DNA, 20 bp, synthetic construct
  misc_feature 1..20: note = chemically synthesized
  source 1..20: mol_type = other DNA
gtgctgcagctgtccacttt

SEQ ID NO: 46938 - DNA, 20 bp, synthetic construct
  misc_feature 1..20: note = chemically synthesized
  source 1..20: mol_type = other DNA
tgctgcagctgtccactttc

SEQ ID NO: 46939 - DNA, 20 bp, synthetic construct
  misc_feature 1..20: note = chemically synthesized
  source 1..20: mol_type = other DNA
tgcagctgtccactttcggg

SEQ ID NO: 46940 - DNA, 20 bp, synthetic construct
  misc_feature 1..20: note = chemically synthesized
  source 1..20: mol_type = other DNA
ggtggtgcctgcatatcgtg

SEQ ID NO: 46941 - DNA, 20 bp, synthetic construct
  misc_feature 1..20: note = chemically synthesized
  source 1..20: mol_type = other DNA
gtgcagaaccatctatgaac

SEQ ID NO: 46942 - DNA, 20 bp, synthetic construct
  misc_feature 1..20: note = chemically synthesized
  source 1..20: mol_type = other DNA
accatctatgaaccagtcct

SEQ ID NO: 46943 - DNA, 20 bp, synthetic construct
  misc_feature 1..20: note = chemically synthesized
  source 1..20: mol_type = other DNA
cttcctctgtcaactgatca

SEQ ID NO: 46944 - DNA, 20 bp, synthetic construct
  misc_feature 1..20: note = chemically synthesized
  source 1..20: mol_type = other DNA
ttcctctgtcaactgatcat

SEQ ID NO: 46945 - DNA, 20 bp, synthetic construct
  misc_feature 1..20: note = chemically synthesized
  source 1..20: mol_type = other DNA
tcctctgtcaactgatcata

SEQ ID NO: 46946 - DNA, 20 bp, synthetic construct
  misc_feature 1..20: note = chemically synthesized
  source 1..20: mol_type = other DNA
gatcatagggaactccccat

SEQ ID NO: 46947 - DNA, 20 bp, synthetic construct
  misc_feature 1..20: note = chemically synthesized
  source 1..20: mol_type = other DNA
atcatagggaactccccatg

SEQ ID NO: 46948 - DNA, 20 bp, synthetic construct
  misc_feature 1..20: note = chemically synthesized
  source 1..20: mol_type = other DNA
ggaactccccatgaggccat

SEQ ID NO: 46949 - DNA, 20 bp, synthetic construct
  misc_feature 1..20: note = chemically synthesized
  source 1..20: mol_type = other DNA
tccccatgaggccattggtg

SEQ ID NO: 46950 - DNA, 20 bp, synthetic construct
  misc_feature 1..20: note = chemically synthesized
  source 1..20: mol_type = other DNA
ccccatgaggccattggtgc

SEQ ID NO: 46951 - DNA, 20 bp, synthetic construct
  misc_feature 1..20: note = chemically synthesized
  source 1..20: mol_type = other DNA
atgaggccattggtgcaggc

SEQ ID NO: 46952 - DNA, 20 bp, synthetic construct
  misc_feature 1..20: note = chemically synthesized
  source 1..20: mol_type = other DNA
tgaggccattggtgcaggct

SEQ ID NO: 46953 - DNA, 20 bp, synthetic construct
  misc_feature 1..20: note = chemically synthesized
  source 1..20: mol_type = other DNA
gaggccattggtgcaggctg

SEQ ID NO: 46954 - DNA, 20 bp, synthetic construct
  misc_feature 1..20: note = chemically synthesized
  source 1..20: mol_type = other DNA
aggccattggtgcaggctgg

SEQ ID NO: 46955 - DNA, 20 bp, synthetic construct
  misc_feature 1..20: note = chemically synthesized
  source 1..20: mol_type = other DNA
gccattggtgcaggctgggg

SEQ ID NO: 46956 - DNA, 20 bp, synthetic construct
  misc_feature 1..20: note = chemically synthesized
  source 1..20: mol_type = other DNA
ccattggtgcaggctggggg

SEQ ID NO: 46957 - DNA, 20 bp, synthetic construct
  misc_feature 1..20: note = chemically synthesized
  source 1..20: mol_type = other DNA
cattggtgcaggctggggga

SEQ ID NO: 46958 - DNA, 20 bp, synthetic construct
  misc_feature 1..20: note = chemically synthesized
  source 1..20: mol_type = other DNA
tggtgcaggctgggggaggg

SEQ ID NO: 46959 - DNA, 20 bp, synthetic construct
  misc_feature 1..20: note = chemically synthesized
  source 1..20: mol_type = other DNA
ggtgcaggctgggggaggga

SEQ ID NO: 46960 - DNA, 20 bp, synthetic construct
  misc_feature 1..20: note = chemically synthesized
  source 1..20: mol_type = other DNA
gcaggctgggggagggaagg

SEQ ID NO: 46961 - DNA, 20 bp, synthetic construct
  misc_feature 1..20: note = chemically synthesized
  source 1..20: mol_type = other DNA
caggctgggggagggaaggc

SEQ ID NO: 46962 - DNA, 20 bp, synthetic construct
  misc_feature 1..20: note = chemically synthesized
  source 1..20: mol_type = other DNA
aggctgggggagggaaggca

SEQ ID NO: 46963 - DNA, 20 bp, synthetic construct
  misc_feature 1..20: note = chemically synthesized
  source 1..20: mol_type = other DNA
ctgggggagggaaggcaggg

SEQ ID NO: 46964 - DNA, 20 bp, synthetic construct
  misc_feature 1..20: note = chemically synthesized
  source 1..20: mol_type = other DNA
gagggaaggcagggtggcat

SEQ ID NO: 46965 - DNA, 20 bp, synthetic construct
  misc_feature 1..20: note = chemically synthesized
  source 1..20: mol_type = other DNA
ggaaggcagggtggcatgag

SEQ ID NO: 46966 - DNA, 20 bp, synthetic construct
  misc_feature 1..20: note = chemically synthesized
  source 1..20: mol_type = other DNA
aaggcagggtggcatgagtg

SEQ ID NO: 46967 - DNA, 20 bp, synthetic construct
  misc_feature 1..20: note = chemically synthesized
  source 1..20: mol_type = other DNA
ggtggcatgagtggagaaca

SEQ ID NO: 46968 - DNA, 20 bp, synthetic construct
  misc_feature 1..20: note = chemically synthesized
  source 1..20: mol_type = other DNA
gtggcatgagtggagaacat

SEQ ID NO: 46969 - DNA, 20 bp, synthetic construct
  misc_feature 1..20: note = chemically synthesized
  source 1..20: mol_type = other DNA
agtggagaacatgggcattt

SEQ ID NO: 46970 - DNA, 20 bp, synthetic construct
  misc_feature 1..20: note = chemically synthesized
  source 1..20: mol_type = other DNA
atgtaacttacttgtgcctt

SEQ ID NO: 46971 - DNA, 20 bp, synthetic construct
  misc_feature 1..20: note = chemically synthesized
  source 1..20: mol_type = other DNA
tgtaacttacttgtgccttc

SEQ ID NO: 46972 - DNA, 20 bp, synthetic construct
  misc_feature 1..20: note = chemically synthesized
  source 1..20: mol_type = other DNA
tgtgccttcaggacctgctc

SEQ ID NO: 46973 - DNA, 20 bp, synthetic construct
  misc_feature 1..20: note = chemically synthesized
  source 1..20: mol_type = other DNA
cgctgtgctgacccacttca

SEQ ID NO: 46974 - DNA, 20 bp, synthetic construct
  misc_feature 1..20: note = chemically synthesized
  source 1..20: mol_type = other DNA
gtgctgacccacttcatggc

SEQ ID NO: 46975 - DNA, 20 bp, synthetic construct
  misc_feature 1..20: note = chemically synthesized
  source 1..20: mol_type = other DNA
tgacccacttcatggctaga

SEQ ID NO: 46976 - DNA, 20 bp, synthetic construct
  misc_feature 1..20: note = chemically synthesized
  source 1..20: mol_type = other DNA
gacccacttcatggctagat

SEQ ID NO: 46977 - DNA, 20 bp, synthetic construct
  misc_feature 1..20: note = chemically synthesized
  source 1..20: mol_type = other DNA
cacttcatggctagatgggt

SEQ ID NO: 46978 - DNA, 20 bp, synthetic construct
  misc_feature 1..20: note = chemically synthesized
  source 1..20: mol_type = other DNA
tcatggctagatgggtcaga

SEQ ID NO: 46979 - DNA, 20 bp, synthetic construct
  misc_feature 1..20: note = chemically synthesized
  source 1..20: mol_type = other DNA
tagatgggtcagaaagcaac

SEQ ID NO: 46980 - DNA, 20 bp, synthetic construct
  misc_feature 1..20: note = chemically synthesized
  source 1..20: mol_type = other DNA
agaaagcaaccagttcatga

SEQ ID NO: 46981 - DNA, 20 bp, synthetic construct
  misc_feature 1..20: note = chemically synthesized
  source 1..20: mol_type = other DNA
gaaagcaaccagttcatgat

SEQ ID NO: 46982 - DNA, 20 bp, synthetic construct
  misc_feature 1..20: note = chemically synthesized
  source 1..20: mol_type = other DNA
agcaaccagttcatgatagg

SEQ ID NO: 46983 - DNA, 20 bp, synthetic construct
  misc_feature 1..20: note = chemically synthesized
  source 1..20: mol_type = other DNA
gcaaccagttcatgataggc

SEQ ID NO: 46984 - DNA, 20 bp, synthetic construct
  misc_feature 1..20: note = chemically synthesized
  source 1..20: mol_type = other DNA
cagttcatgataggcaggtt

SEQ ID NO: 46985 - DNA, 20 bp, synthetic construct
  misc_feature 1..20: note = chemically synthesized
  source 1..20: mol_type = other DNA
agttcatgataggcaggttc

SEQ ID NO: 46986 - DNA, 20 bp, synthetic construct
  misc_feature 1..20: note = chemically synthesized
  source 1..20: mol_type = other DNA
tcatgataggcaggttcagg

SEQ ID NO: 46987 - DNA, 20 bp, synthetic construct
  misc_feature 1..20: note = chemically synthesized
  source 1..20: mol_type = other DNA
ataggcaggttcaggtagca

SEQ ID NO: 46988 - DNA, 20 bp, synthetic construct
  misc_feature 1..20: note = chemically synthesized
  source 1..20: mol_type = other DNA
catggtgactttatgaccca

SEQ ID NO: 46989 - DNA, 20 bp, synthetic construct
  misc_feature 1..20: note = chemically synthesized
  source 1..20: mol_type = other DNA
atgacccacagtcaaacgtt

SEQ ID NO: 46990 - DNA, 20 bp, synthetic construct
  misc_feature 1..20: note = chemically synthesized
  source 1..20: mol_type = other DNA
caaacgttcagttaccacca

SEQ ID NO: 46991 - DNA, 20 bp, synthetic construct
  misc_feature 1..20: note = chemically synthesized
  source 1..20: mol_type = other DNA
ttaccaccaaagcccaataa

SEQ ID NO: 46992 - DNA, 20 bp, synthetic construct
  misc_feature 1..20: note = chemically synthesized
  source 1..20: mol_type = other DNA
aaagcccaataacagaccaa

SEQ ID NO: 46993 - DNA, 20 bp, synthetic construct
  misc_feature 1..20: note = chemically synthesized
  source 1..20: mol_type = other DNA
gaccaatagctgtctctcaa

SEQ ID NO: 46994 - DNA, 20 bp, synthetic construct
  misc_feature 1..20: note = chemically synthesized
  source 1..20: mol_type = other DNA
accaatagctgtctctcaaa

SEQ ID NO: 46995 - DNA, 20 bp, synthetic construct
  misc_feature 1..20: note = chemically synthesized
  source 1..20: mol_type = other DNA
caatagctgtctctcaaaag

SEQ ID NO: 46996 - DNA, 20 bp, synthetic construct
  misc_feature 1..20: note = chemically synthesized
  source 1..20: mol_type = other DNA
atagctgtctctcaaaagga

SEQ ID NO: 46997 - DNA, 20 bp, synthetic construct
  misc_feature 1..20: note = chemically synthesized
  source 1..20: mol_type = other DNA
gctgtctctcaaaaggagag

SEQ ID NO: 46998 - DNA, 20 bp, synthetic construct
  misc_feature 1..20: note = chemically synthesized
  source 1..20: mol_type = other DNA
aaaaggagagtagttatctg

SEQ ID NO: 46999 - DNA, 20 bp, synthetic construct
  misc_feature 1..20: note = chemically synthesized
  source 1..20: mol_type = other DNA
aggagagtagttatctgcag

SEQ ID NO: 47000 - DNA, 20 bp, synthetic construct
  misc_feature 1..20: note = chemically synthesized
  source 1..20: mol_type = other DNA
agagtagttatctgcagaag

SEQ ID NO: 47001 - DNA, 20 bp, synthetic construct
  misc_feature 1..20: note = chemically synthesized
  source 1..20: mol_type = other DNA
gtagttatctgcagaagtgg

SEQ ID NO: 47002 - DNA, 20 bp, synthetic construct
  misc_feature 1..20: note = chemically synthesized
  source 1..20: mol_type = other DNA
tagttatctgcagaagtggc

SEQ ID NO: 47003 - DNA, 20 bp, synthetic construct
  misc_feature 1..20: note = chemically synthesized
  source 1..20: mol_type = other DNA
agttatctgcagaagtggca

SEQ ID NO: 47004 - DNA, 20 bp, synthetic construct
  misc_feature 1..20: note = chemically synthesized
  source 1..20: mol_type = other DNA
agggccttgctccaaaatcc

SEQ ID NO: 47005 - DNA, 20 bp, synthetic construct
  misc_feature 1..20: note = chemically synthesized
  source 1..20: mol_type = other DNA
ggccttgctccaaaatccta

SEQ ID NO: 47006 - DNA, 20 bp, synthetic construct
  misc_feature 1..20: note = chemically synthesized
  source 1..20: mol_type = other DNA
gccttgctccaaaatcctag

SEQ ID NO: 47007 - DNA, 20 bp, synthetic construct
  misc_feature 1..20: note = chemically synthesized
  source 1..20: mol_type = other DNA
tctccactgtgattcaccta

SEQ ID NO: 47008 - DNA, 20 bp, synthetic construct
  misc_feature 1..20: note = chemically synthesized
  source 1..20: mol_type = other DNA
ctccactgtgattcacctat

SEQ ID NO: 47009 - DNA, 20 bp, synthetic construct
  misc_feature 1..20: note = chemically synthesized
  source 1..20: mol_type = other DNA
tccactgtgattcacctatg

SEQ ID NO: 47010 - DNA, 20 bp, synthetic construct
  misc_feature 1..20: note = chemically synthesized
  source 1..20: mol_type = other DNA
ccactgtgattcacctatgg

SEQ ID NO: 47011 - DNA, 20 bp, synthetic construct
  misc_feature 1..20: note = chemically synthesized
  source 1..20: mol_type = other DNA
tcacctatgggggcctgcca

SEQ ID NO: 47012 - DNA, 20 bp, synthetic construct
  misc_feature 1..20: note = chemically synthesized
  source 1..20: mol_type = other DNA
cacctatgggggcctgccaa

SEQ ID NO: 47013 - DNA, 20 bp, synthetic construct
  misc_feature 1..20: note = chemically synthesized
  source 1..20: mol_type = other DNA
ggcctgccaaaggctccaaa

SEQ ID NO: 47014 - DNA, 20 bp, synthetic construct
  misc_feature 1..20: note = chemically synthesized
  source 1..20: mol_type = other DNA
ctatctgccactgacacctc

SEQ ID NO: 47015 - DNA, 20 bp, synthetic construct
  misc_feature 1..20: note = chemically synthesized
  source 1..20: mol_type = other DNA
actgacacctcaagcaccat

SEQ ID NO: 47016 - DNA, 20 bp, synthetic construct
  misc_feature 1..20: note = chemically synthesized
  source 1..20: mol_type = other DNA
ctcaagcaccattggatctg

SEQ ID NO: 47017 - DNA, 20 bp, synthetic construct
  misc_feature 1..20: note = chemically synthesized
  source 1..20: mol_type = other DNA
tcaagcaccattggatctgc

SEQ ID NO: 47018 - DNA, 20 bp, synthetic construct
  misc_feature 1..20: note = chemically synthesized
  source 1..20: mol_type = other DNA
caagcaccattggatctgcg

SEQ ID NO: 47019 - DNA, 20 bp, synthetic construct
  misc_feature 1..20: note = chemically synthesized
  source 1..20: mol_type = other DNA
attggatctgcggggtcatg

SEQ ID NO: 47020 - DNA, 20 bp, synthetic construct
  misc_feature 1..20: note = chemically synthesized
  source 1..20: mol_type = other DNA
gcggggtcatgtggcccaaa

SEQ ID NO: 47021 - DNA, 20 bp, synthetic construct
  misc_feature 1..20: note = chemically synthesized
  source 1..20: mol_type = other DNA
gggtcatgtggcccaaatgg

SEQ ID NO: 47022 - DNA, 20 bp, synthetic construct
  misc_feature 1..20: note = chemically synthesized
  source 1..20: mol_type = other DNA
gtcatgtggcccaaatggca

SEQ ID NO: 47023 - DNA, 20 bp, synthetic construct
  misc_feature 1..20: note = chemically synthesized
  source 1..20: mol_type = other DNA
atgtggcccaaatggcagag

SEQ ID NO: 47024 - DNA, 20 bp, synthetic construct
  misc_feature 1..20: note = chemically synthesized
  source 1..20: mol_type = other DNA
aaatggcagagcagctttca

SEQ ID NO: 47025 - DNA, 20 bp, synthetic construct
  misc_feature 1..20: note = chemically synthesized
  source 1..20: mol_type = other DNA
tggcagagcagctttcacag

SEQ ID NO: 47026 - DNA, 20 bp, synthetic construct
  misc_feature 1..20: note = chemically synthesized
  source 1..20: mol_type = other DNA
gagcagctttcacagcagcc

SEQ ID NO: 47027 - DNA, 20 bp, synthetic construct
  misc_feature 1..20: note = chemically synthesized
  source 1..20: mol_type = other DNA
acagcagcctggacctgttt

SEQ ID NO: 47028 - DNA, 20 bp, synthetic construct
  misc_feature 1..20: note = chemically synthesized
  source 1..20: mol_type = other DNA
agcagcctggacctgtttca

SEQ ID NO: 47029 - DNA, 20 bp, synthetic construct
  misc_feature 1..20: note = chemically synthesized
  source 1..20: mol_type = other DNA
ttcagagccttcttttgttc

SEQ ID NO: 47030 - DNA, 20 bp, synthetic construct
  misc_feature 1..20: note = chemically synthesized
  source 1..20: mol_type = other DNA
ttctagactgcacttaaatc

SEQ ID NO: 47031 - DNA, 20 bp, synthetic construct
  misc_feature 1..20: note = chemically synthesized
  source 1..20: mol_type = other DNA
tagactgcacttaaatctgg

SEQ ID NO: 47032 - DNA, 20 bp, synthetic construct
  misc_feature 1..20: note = chemically synthesized
  source 1..20: mol_type = other DNA
acttaaatctggcagccttt

SEQ ID NO: 47033 - DNA, 20 bp, synthetic construct
  misc_feature 1..20: note = chemically synthesized
  source 1..20: mol_type = other DNA
cttaaatctggcagcctttc

SEQ ID NO: 47034 - DNA, 20 bp, synthetic construct
  misc_feature 1..20: note = chemically synthesized
  source 1..20: mol_type = other DNA
ctttcaggtcactcgataaa

SEQ ID NO: 47035 - DNA, 20 bp, synthetic construct
  misc_feature 1..20: note = chemically synthesized
  source 1..20: mol_type = other DNA
tttcaggtcactcgataaat

SEQ ID NO: 47036 - DNA, 20 bp, synthetic construct
  misc_feature 1..20: note = chemically synthesized
  source 1..20: mol_type = other DNA
aggtcactcgataaatgggc

SEQ ID NO: 47037 - DNA, 20 bp, synthetic construct
  misc_feature 1..20: note = chemically synthesized
  source 1..20: mol_type = other DNA
gtcactcgataaatgggcca

SEQ ID NO: 47038 - DNA, 20 bp, synthetic construct
  misc_feature 1..20: note = chemically synthesized
  source 1..20: mol_type = other DNA
ccagagtaacacacccaaac

SEQ ID NO: 47039 - DNA, 20 bp, synthetic construct
  misc_feature 1..20: note = chemically synthesized
  source 1..20: mol_type = other DNA
cagagtaacacacccaaacg

SEQ ID NO: 47040 - DNA, 20 bp, synthetic construct
  misc_feature 1..20: note = chemically synthesized
  source 1..20: mol_type = other DNA
tgttgcctccaaaatccaaa

SEQ ID NO: 47041 - DNA, 20 bp, synthetic construct
  misc_feature 1..20: note = chemically synthesized
  source 1..20: mol_type = other DNA
gttgcctccaaaatccaaat

SEQ ID NO: 47042 - DNA, 20 bp, synthetic construct
  misc_feature 1..20: note = chemically synthesized
  source 1..20: mol_type = other DNA
caaaatccaaataggcccac

SEQ ID NO: 47043 - DNA, 20 bp, synthetic construct
  misc_feature 1..20: note = chemically synthesized
  source 1..20: mol_type = other DNA
aaaatccaaataggcccacc

SEQ ID NO: 47044 - DNA, 20 bp, synthetic construct
  misc_feature 1..20: note = chemically synthesized
  source 1..20: mol_type = other DNA
caggcattgtgcctctttct

SEQ ID NO: 47045 - DNA, 20 bp, synthetic construct
  misc_feature 1..20: note = chemically synthesized
  source 1..20: mol_type = other DNA
tgtgcctctttcttggttgt

SEQ ID NO: 47046 - DNA, 20 bp, synthetic construct
  misc_feature 1..20: note = chemically synthesized
  source 1..20: mol_type = other DNA
tgcctctttcttggttgtaa

SEQ ID NO: 47047 - DNA, 20 bp, synthetic construct
  misc_feature 1..20: note = chemically synthesized
  source 1..20: mol_type = other DNA
gcctctttcttggttgtaag

SEQ ID NO: 47048 - DNA, 20 bp, synthetic construct
  misc_feature 1..20: note = chemically synthesized
  source 1..20: mol_type = other DNA
cctctttcttggttgtaaga

SEQ ID NO: 47049 - DNA, 20 bp, synthetic construct
  misc_feature 1..20: note = chemically synthesized
  source 1..20: mol_type = other DNA
ctctttcttggttgtaagag

SEQ ID NO: 47050 - DNA, 20 bp, synthetic construct
  misc_feature 1..20: note = chemically synthesized
  source 1..20: mol_type = other DNA
gttgtaagaggggccaaacg

SEQ ID NO: 47051 - DNA, 20 bp, synthetic construct
  misc_feature 1..20: note = chemically synthesized
  source 1..20: mol_type = other DNA
taagaggggccaaacgcagc

SEQ ID NO: 47052 - DNA, 20 bp, synthetic construct
  misc_feature 1..20: note = chemically synthesized
  source 1..20: mol_type = other DNA
cagcaagttatgcttcacct

SEQ ID NO: 47053 - DNA, 20 bp, synthetic construct
  misc_feature 1..20: note = chemically synthesized
  source 1..20: mol_type = other DNA
caagttatgcttcaccttag

SEQ ID NO: 47054 - DNA, 20 bp, synthetic construct
  misc_feature 1..20: note = chemically synthesized
  source 1..20: mol_type = other DNA
aagttatgcttcaccttaga

SEQ ID NO: 47055 - DNA, 20 bp, synthetic construct
  misc_feature 1..20: note = chemically synthesized
  source 1..20: mol_type = other DNA
ccttagaaggaatatctcca

SEQ ID NO: 47056 - DNA, 20 bp, synthetic construct
  misc_feature 1..20: note = chemically synthesized
  source 1..20: mol_type = other DNA
cttagaaggaatatctccat

SEQ ID NO: 47057 - DNA, 20 bp, synthetic construct
  misc_feature 1..20: note = chemically synthesized
  source 1..20: mol_type = other DNA
ctccataggtctcatgccac

SEQ ID NO: 47058 - DNA, 20 bp, synthetic construct
  misc_feature 1..20: note = chemically synthesized
  source 1..20: mol_type = other DNA
gtctcatgccactggaaccc

SEQ ID NO: 47059 - DNA, 20 bp, synthetic construct
  misc_feature 1..20: note = chemically synthesized
  source 1..20: mol_type = other DNA
ggaaccctagaaattttacc

SEQ ID NO: 47060 - DNA, 20 bp, synthetic construct
  misc_feature 1..20: note = chemically synthesized
  source 1..20: mol_type = other DNA
gaaccctagaaattttaccg

SEQ ID NO: 47061 - DNA, 20 bp, synthetic construct
  misc_feature 1..20: note = chemically synthesized
  source 1..20: mol_type = other DNA
ccctagaaattttaccgagg

SEQ ID NO: 47062 - DNA, 20 bp, synthetic construct
  misc_feature 1..20: note = chemically synthesized
  source 1..20: mol_type = other DNA
agaaattttaccgaggtaga

SEQ ID NO: 47063 - DNA, 20 bp, synthetic construct
  misc_feature 1..20: note = chemically synthesized
  source 1..20: mol_type = other DNA
ggtagaaagtccctaaattt

SEQ ID NO: 47064 - DNA, 20 bp, synthetic construct
  misc_feature 1..20: note = chemically synthesized
  source 1..20: mol_type = other DNA
gaaagtccctaaattttagc

SEQ ID NO: 47065 - DNA, 20 bp, synthetic construct
  misc_feature 1..20: note = chemically synthesized
  source 1..20: mol_type = other DNA
tggatttatttcccatcctc

SEQ ID NO: 47066 - DNA, 20 bp, synthetic construct
  misc_feature 1..20: note = chemically synthesized
  source 1..20: mol_type = other DNA
catacaaatgtctcaccaat

SEQ ID NO: 47067 - DNA, 20 bp, synthetic construct
  misc_feature 1..20: note = chemically synthesized
  source 1..20: mol_type = other DNA
aaatgtctcaccaataagtt

SEQ ID NO: 47068 - DNA, 20 bp, synthetic construct
  misc_feature 1..20: note = chemically synthesized
  source 1..20: mol_type = other DNA
tcataatgtcatgaatgtaa

SEQ ID NO: 47069 - DNA, 20 bp, synthetic construct
  misc_feature 1..20: note = chemically synthesized
  source 1..20: mol_type = other DNA
atgtcatgaatgtaatggac

SEQ ID NO: 47070 - DNA, 20 bp, synthetic construct
  misc_feature 1..20: note = chemically synthesized
  source 1..20: mol_type = other DNA
tggaccagtgttatatctcg

SEQ ID NO: 47071 - DNA, 20 bp, synthetic construct
  misc_feature 1..20: note = chemically synthesized
  source 1..20: mol_type = other DNA
accagtgttatatctcgtgg

SEQ ID NO: 47072 - DNA, 20 bp, synthetic construct
  misc_feature 1..20: note = chemically synthesized
  source 1..20: mol_type = other DNA
ttatatctcgtggaagtgaa

SEQ ID NO: 47073 - DNA, 20 bp, synthetic construct
  misc_feature 1..20: note = chemically synthesized
  source 1..20: mol_type = other DNA
atctcgtggaagtgaaaagc

SEQ ID NO: 47074 - DNA, 20 bp, synthetic construct
  misc_feature 1..20: note = chemically synthesized
  source 1..20: mol_type = other DNA
cgtggaagtgaaaagcgagc

SEQ ID NO: 47075 - DNA, 20 bp, synthetic construct
  misc_feature 1..20: note = chemically synthesized
  source 1..20: mol_type = other DNA
gtggaagtgaaaagcgagca

SEQ ID NO: 47076 - DNA, 20 bp, synthetic construct
  misc_feature 1..20: note = chemically synthesized
  source 1..20: mol_type = other DNA
cgagcaaggtctctccaaat

SEQ ID NO: 47077 - DNA, 20 bp, synthetic construct
  misc_feature 1..20: note = chemically synthesized
  source 1..20: mol_type = other DNA
ccaaataagattatgacaca

SEQ ID NO: 47078 - DNA, 20 bp, synthetic construct
  misc_feature 1..20: note = chemically synthesized
  source 1..20: mol_type = other DNA
ataagattatgacacaaagc

SEQ ID NO: 47079 - DNA, 20 bp, synthetic construct
  misc_feature 1..20: note = chemically synthesized
  source 1..20: mol_type = other DNA
aagattatgacacaaagctg

SEQ ID NO: 47080 - DNA, 20 bp, synthetic construct
  misc_feature 1..20: note = chemically synthesized
  source 1..20: mol_type = other DNA
gattatgacacaaagctgga

SEQ ID NO: 47081 - DNA, 20 bp, synthetic construct
  misc_feature 1..20: note = chemically synthesized
  source 1..20: mol_type = other DNA
tggagagttgatacacccct

SEQ ID NO: 47082 - DNA, 20 bp, synthetic construct
  misc_feature 1..20: note = chemically synthesized
  source 1..20: mol_type = other DNA
ggagagttgatacacccctg

SEQ ID NO: 47083 - DNA, 20 bp, synthetic construct
  misc_feature 1..20: note = chemically synthesized
  source 1..20: mol_type = other DNA
gagttgatacacccctgagg

SEQ ID NO: 47084 - DNA, 20 bp, synthetic construct
  misc_feature 1..20: note = chemically synthesized
  source 1..20: mol_type = other DNA
agttgatacacccctgaggt

SEQ ID NO: 47085 - DNA, 20 bp, synthetic construct
  misc_feature 1..20: note = chemically synthesized
  source 1..20: mol_type = other DNA
gttgatacacccctgaggta

SEQ ID NO: 47086 - DNA, 20 bp, synthetic construct
  misc_feature 1..20: note = chemically synthesized
  source 1..20: mol_type = other DNA
gatacacccctgaggtaggg

SEQ ID NO: 47087 - DNA, 20 bp, synthetic construct
  misc_feature 1..20: note = chemically synthesized
  source 1..20: mol_type = other DNA
acccctgaggtagggtggta

SEQ ID NO: 47088 - DNA, 20 bp, synthetic construct
  misc_feature 1..20: note = chemically synthesized
  source 1..20: mol_type = other DNA
cccctgaggtagggtggtaa

SEQ ID NO: 47089 - DNA, 20 bp, synthetic construct
  misc_feature 1..20: note = chemically synthesized
  source 1..20: mol_type = other DNA
gggtggtaaaggtataatgc

SEQ ID NO: 47090 - DNA, 20 bp, synthetic construct
  misc_feature 1..20: note = chemically synthesized
  source 1..20: mol_type = other DNA
aggtataatgctggccttgt

SEQ ID NO: 47091 - DNA, 20 bp, synthetic construct
  misc_feature 1..20: note = chemically synthesized
  source 1..20: mol_type = other DNA
aatgctggccttgtcagctg

SEQ ID NO: 47092 - DNA, 20 bp, synthetic construct
  misc_feature 1..20: note = chemically synthesized
  source 1..20: mol_type = other DNA
atgctggccttgtcagctga

SEQ ID NO: 47093 - DNA, 20 bp, synthetic construct
  misc_feature 1..20: note = chemically synthesized
  source 1..20: mol_type = other DNA
agctgaaggcaaattgcttc

SEQ ID NO: 47094 - DNA, 20 bp, synthetic construct
  misc_feature 1..20: note = chemically synthesized
  source 1..20: mol_type = other DNA
tgaaggcaaattgcttctgg

SEQ ID NO: 47095 - DNA, 20 bp, synthetic construct
  misc_feature 1..20: note = chemically synthesized
  source 1..20: mol_type = other DNA
gaaggcaaattgcttctggt

SEQ ID NO: 47096 - DNA, 20 bp, synthetic construct
  misc_feature 1..20: note = chemically synthesized
  source 1..20: mol_type = other DNA
attgcttctggtgggtctta

SEQ ID NO: 47097 - DNA, 20 bp, synthetic construct
  misc_feature 1..20: note = chemically synthesized
  source 1..20: mol_type = other DNA
cttctggtgggtcttatgga

SEQ ID NO: 47098 - DNA, 20 bp, synthetic construct
  misc_feature 1..20: note = chemically synthesized
  source 1..20: mol_type = other DNA
ttctggtgggtcttatggac

SEQ ID NO: 47099 - DNA, 20 bp, synthetic construct
  misc_feature 1..20: note = chemically synthesized
  source 1..20: mol_type = other DNA
gtgggtcttatggacaggaa

SEQ ID NO: 47100 - DNA, 20 bp, synthetic construct
  misc_feature 1..20: note = chemically synthesized
  source 1..20: mol_type = other DNA
gggtcttatggacaggaatg

SEQ ID NO: 47101 - DNA, 20 bp, synthetic construct
  misc_feature 1..20: note = chemically synthesized
  source 1..20: mol_type = other DNA
tatggacaggaatggagaaa

SEQ ID NO: 47102 - DNA, 20 bp, synthetic construct
  misc_feature 1..20: note = chemically synthesized
  source 1..20: mol_type = other DNA
tggagaaaaagccacttgcc

SEQ ID NO: 47103 - DNA, 20 bp, synthetic construct
  misc_feature 1..20: note = chemically synthesized
  source 1..20: mol_type = other DNA
aaagccacttgccaagccaa

SEQ ID NO: 47104 - DNA, 20 bp, synthetic construct
  misc_feature 1..20: note = chemically synthesized
  source 1..20: mol_type = other DNA
ccaagccaatggctgcatac

SEQ ID NO: 47105 - DNA, 20 bp, synthetic construct
  misc_feature 1..20: note = chemically synthesized
  source 1..20: mol_type = other DNA
caagccaatggctgcatacc

SEQ ID NO: 47106 - DNA, 20 bp, synthetic construct
  misc_feature 1..20: note = chemically synthesized
  source 1..20: mol_type = other DNA
aatggctgcataccaggcac

SEQ ID NO: 47107 - DNA, 20 bp, synthetic construct
  misc_feature 1..20: note = chemically synthesized
  source 1..20: mol_type = other DNA
atggctgcataccaggcacc

SEQ ID NO: 47108 - DNA, 20 bp, synthetic construct
  misc_feature 1..20: note = chemically synthesized
  source 1..20: mol_type = other DNA
ggctgcataccaggcaccag

SEQ ID NO: 47109 - DNA, 20 bp, synthetic construct
  misc_feature 1..20: note = chemically synthesized
  source 1..20: mol_type = other DNA
ggagatgtgttaatttgctc

SEQ ID NO: 47110 - DNA, 20 bp, synthetic construct
  misc_feature 1..20: note = chemically synthesized
  source 1..20: mol_type = other DNA
tcaagcaacaaaaccacaac

SEQ ID NO: 47111 - DNA, 20 bp, synthetic construct
  misc_feature 1..20: note = chemically synthesized
  source 1..20: mol_type = other DNA
agcaacaaaaccacaactgg

SEQ ID NO: 47112 - DNA, 20 bp, synthetic construct
  misc_feature 1..20: note = chemically synthesized
  source 1..20: mol_type = other DNA
caacaaaaccacaactggta

SEQ ID NO: 47113 - DNA, 20 bp, synthetic construct
  misc_feature 1..20: note = chemically synthesized
  source 1..20: mol_type = other DNA
caaaaccacaactggtagag

SEQ ID NO: 47114 - DNA, 20 bp, synthetic construct
  misc_feature 1..20: note = chemically synthesized
  source 1..20: mol_type = other DNA
actggtagagcagctgcaat

SEQ ID NO: 47115 - DNA, 20 bp, synthetic construct
  misc_feature 1..20: note = chemically synthesized
  source 1..20: mol_type = other DNA
tggtagagcagctgcaattg

SEQ ID NO: 47116 - DNA, 20 bp, synthetic construct
  misc_feature 1..20: note = chemically synthesized
  source 1..20: mol_type = other DNA
ctgcaattggagtcaccact

SEQ ID NO: 47117 - DNA, 20 bp, synthetic construct
  misc_feature 1..20: note = chemically synthesized
  source 1..20: mol_type = other DNA
attggagtcaccacttggtt

SEQ ID NO: 47118 - DNA, 20 bp, synthetic construct
  misc_feature 1..20: note = chemically synthesized
  source 1..20: mol_type = other DNA
ataatccaccatcattttcc

SEQ ID NO: 47119 - DNA, 20 bp, synthetic construct
  misc_feature 1..20: note = chemically synthesized
  source 1..20: mol_type = other DNA
agatccatctgtcctctgca

SEQ ID NO: 47120 - DNA, 20 bp, synthetic construct
  misc_feature 1..20: note = chemically synthesized
  source 1..20: mol_type = other DNA
gatccatctgtcctctgcac

SEQ ID NO: 47121 - DNA, 20 bp, synthetic construct
  misc_feature 1..20: note = chemically synthesized
  source 1..20: mol_type = other DNA
tgtcctctgcacaggtcaaa

SEQ ID NO: 47122 - DNA, 20 bp, synthetic construct
  misc_feature 1..20: note = chemically synthesized
  source 1..20: mol_type = other DNA
gtcctctgcacaggtcaaat

SEQ ID NO: 47123 - DNA, 20 bp, synthetic construct
  misc_feature 1..20: note = chemically synthesized
  source 1..20: mol_type = other DNA
cctctgcacaggtcaaatgg

SEQ ID NO: 47124 - DNA, 20 bp, synthetic construct
  misc_feature 1..20: note = chemically synthesized
  source 1..20: mol_type = other DNA
tctgcacaggtcaaatggga

SEQ ID NO: 47125 - DNA, 20 bp, synthetic construct
  misc_feature 1..20: note = chemically synthesized
  source 1..20: mol_type = other DNA
ggtcaaatgggagagttgaa

SEQ ID NO: 47126 - DNA, 20 bp, synthetic construct
  misc_feature 1..20: note = chemically synthesized
  source 1..20: mol_type = other DNA
gtcaaatgggagagttgaac

SEQ ID NO: 47127 - DNA, 20 bp, synthetic construct
  misc_feature 1..20: note = chemically synthesized
  source 1..20: mol_type = other DNA
tcaaatgggagagttgaaca

SEQ ID NO: 47128 - DNA, 20 bp, synthetic construct
  misc_feature 1..20: note = chemically synthesized
  source 1..20: mol_type = other DNA
gggagagttgaacagggatg

SEQ ID NO: 47129 - DNA, 20 bp, synthetic construct
  misc_feature 1..20: note = chemically synthesized
  source 1..20: mol_type = other DNA
agagttgaacagggatgtgg

SEQ ID NO: 47130 - DNA, 20 bp, synthetic construct
  misc_feature 1..20: note = chemically synthesized
  source 1..20: mol_type = other DNA
gagttgaacagggatgtggt

SEQ ID NO: 47131 - DNA, 20 bp, synthetic construct
  misc_feature 1..20: note = chemically synthesized
  source 1..20: mol_type = other DNA
tcaccacccctgcgtctttc

SEQ ID NO: 47132 - DNA, 20 bp, synthetic construct
  misc_feature 1..20: note = chemically synthesized
  source 1..20: mol_type = other DNA
tgcgtctttcaagtccttga

SEQ ID NO: 47133 - DNA, 20 bp, synthetic construct
  misc_feature 1..20: note = chemically synthesized
  source 1..20: mol_type = other DNA
gatggtgacactaatcactt

SEQ ID NO: 47134 - DNA, 20 bp, synthetic construct
  misc_feature 1..20: note = chemically synthesized
  source 1..20: mol_type = other DNA
actaatcacttcagtccctc

SEQ ID NO: 47135 - DNA, 20 bp, synthetic construct
  misc_feature 1..20: note = chemically synthesized
  source 1..20: mol_type = other DNA
ctaatcacttcagtccctcc

SEQ ID NO: 47136 - DNA, 20 bp, synthetic construct
  misc_feature 1..20: note = chemically synthesized
  source 1..20: mol_type = other DNA
taatcacttcagtccctcca

SEQ ID NO: 47137 - DNA, 20 bp, synthetic construct
  misc_feature 1..20: note = chemically synthesized
  source 1..20: mol_type = other DNA
cacttcagtccctccaggga

SEQ ID NO: 47138 - DNA, 20 bp, synthetic construct
  misc_feature 1..20: note = chemically synthesized
  source 1..20: mol_type = other DNA
acttcagtccctccagggat

SEQ ID NO: 47139 - DNA, 20 bp, synthetic construct
  misc_feature 1..20: note = chemically synthesized
  source 1..20: mol_type = other DNA
ttttgatttttttatttttc

SEQ ID NO: 47140 - DNA, 20 bp, synthetic construct
  misc_feature 1..20: note = chemically synthesized
  source 1..20: mol_type = other DNA
tttgatttttttatttttct

SEQ ID NO: 47141 - DNA, 20 bp, synthetic construct
  misc_feature 1..20: note = chemically synthesized
  source 1..20: mol_type = other DNA
gatttttttatttttctagg

SEQ ID NO: 47142 - DNA, 20 bp, synthetic construct
  misc_feature 1..20: note = chemically synthesized
  source 1..20: mol_type = other DNA
tttttttatttttctaggta

SEQ ID NO: 47143 - DNA, 20 bp, synthetic construct
  misc_feature 1..20: note = chemically synthesized
  source 1..20: mol_type = other DNA
tttatttttctaggtagaga

SEQ ID NO: 47144 - DNA, 20 bp, synthetic construct
  misc_feature 1..20: note = chemically synthesized
  source 1..20: mol_type = other DNA
ctaggtagagacagctctaa

SEQ ID NO: 47145 - DNA, 20 bp, synthetic construct
  misc_feature 1..20: note = chemically synthesized
  source 1..20: mol_type = other DNA
cagctctaatggcttctgtt

SEQ ID NO: 47146 - DNA, 20 bp, synthetic construct
  misc_feature 1..20: note = chemically synthesized
  source 1..20: mol_type = other DNA
tttggcctttcccaccataa

SEQ ID NO: 47147 - DNA, 20 bp, synthetic construct
  misc_feature 1..20: note = chemically synthesized
  source 1..20: mol_type = other DNA
cataatagccctcatcctac

SEQ ID NO: 47148 - DNA, 20 bp, synthetic construct
  misc_feature 1..20: note = chemically synthesized
  source 1..20: mol_type = other DNA
atagccctcatcctaccagt

SEQ ID NO: 47149 - DNA, 20 bp, synthetic construct
  misc_feature 1..20: note = chemically synthesized
  source 1..20: mol_type = other DNA
tagccctcatcctaccagtc

SEQ ID NO: 47150 - DNA, 20 bp, synthetic construct
  misc_feature 1..20: note = chemically synthesized
  source 1..20: mol_type = other DNA
agccctcatcctaccagtca

SEQ ID NO: 47151 - DNA, 20 bp, synthetic construct
  misc_feature 1..20: note = chemically synthesized
  source 1..20: mol_type = other DNA
ccctcatcctaccagtcagg

SEQ ID NO: 47152 - DNA, 20 bp, synthetic construct
  misc_feature 1..20: note = chemically synthesized
  source 1..20: mol_type = other DNA
taccagtcagggagccaatg

SEQ ID NO: 47153 - DNA, 20 bp, synthetic construct
  misc_feature 1..20: note = chemically synthesized
  source 1..20: mol_type = other DNA
agccaatgtggcatttctgc

SEQ ID NO: 47154 - DNA, 20 bp, synthetic construct
  misc_feature 1..20: note = chemically synthesized
  source 1..20: mol_type = other DNA
tggcatttctgccagctaat

SEQ ID NO: 47155 - DNA, 20 bp, synthetic construct
  misc_feature 1..20: note = chemically synthesized
  source 1..20: mol_type = other DNA
tctatacaaattatgcattt

SEQ ID NO: 47156 - DNA, 20 bp, synthetic construct
  misc_feature 1..20: note = chemically synthesized
  source 1..20: mol_type = other DNA
caaattatgcattttggcac

SEQ ID NO: 47157 - DNA, 20 bp, synthetic construct
  misc_feature 1..20: note = chemically synthesized
  source 1..20: mol_type = other DNA
aaattatgcattttggcact

SEQ ID NO: 47158 - DNA, 20 bp, synthetic construct
  misc_feature 1..20: note = chemically synthesized
  source 1..20: mol_type = other DNA
tttggcactgggaaaatgac

SEQ ID NO: 47159 - DNA, 20 bp, synthetic construct
  misc_feature 1..20: note = chemically synthesized
  source 1..20: mol_type = other DNA
tggcactgggaaaatgacca

SEQ ID NO: 47160 - DNA, 20 bp, synthetic construct
  misc_feature 1..20: note = chemically synthesized
  source 1..20: mol_type = other DNA
ggcactgggaaaatgaccag

SEQ ID NO: 47161 - DNA, 20 bp, synthetic construct
  misc_feature 1..20: note = chemically synthesized
  source 1..20: mol_type = other DNA
tgggaaaatgaccagaggat

SEQ ID NO: 47162 - DNA, 20 bp, synthetic construct
  misc_feature 1..20: note = chemically synthesized
  source 1..20: mol_type = other DNA
aaatgaccagaggataagtc

SEQ ID NO: 47163 - DNA, 20 bp, synthetic construct
  misc_feature 1..20: note = chemically synthesized
  source 1..20: mol_type = other DNA
aatgaccagaggataagtcc

SEQ ID NO: 47164 - DNA, 20 bp, synthetic construct
  misc_feature 1..20: note = chemically synthesized
  source 1..20: mol_type = other DNA
atgaccagaggataagtcca

SEQ ID NO: 47165 - DNA, 20 bp, synthetic construct
  misc_feature 1..20: note = chemically synthesized
  source 1..20: mol_type = other DNA
ggataagtccagggacccac

SEQ ID NO: 47166 - DNA, 20 bp, synthetic construct
  misc_feature 1..20: note = chemically synthesized
  source 1..20: mol_type = other DNA
ggacccactggaaccactgt

SEQ ID NO: 47167 - DNA, 20 bp, synthetic construct
  misc_feature 1..20: note = chemically synthesized
  source 1..20: mol_type = other DNA
ccactggaaccactgtaagt

SEQ ID NO: 47168 - DNA, 20 bp, synthetic construct
  misc_feature 1..20: note = chemically synthesized
  source 1..20: mol_type = other DNA
aaccactgtaagtcagaaat

SEQ ID NO: 47169 - DNA, 20 bp, synthetic construct
  misc_feature 1..20: note = chemically synthesized
  source 1..20: mol_type = other DNA
attaattacctaacctccat

SEQ ID NO: 47170 - DNA, 20 bp, synthetic construct
  misc_feature 1..20: note = chemically synthesized
  source 1..20: mol_type = other DNA
ccataagcccctactttaac

SEQ ID NO: 47171 - DNA, 20 bp, synthetic construct
  misc_feature 1..20: note = chemically synthesized
  source 1..20: mol_type = other DNA
cataagcccctactttaact

SEQ ID NO: 47172 - DNA, 20 bp, synthetic construct
  misc_feature 1..20: note = chemically synthesized
  source 1..20: mol_type = other DNA
ataagcccctactttaactg

SEQ ID NO: 47173 - DNA, 20 bp, synthetic construct
  misc_feature 1..20: note = chemically synthesized
  source 1..20: mol_type = other DNA
ggggaaccacaataacgttt

SEQ ID NO: 47174 - DNA, 20 bp, synthetic construct
  misc_feature 1..20: note = chemically synthesized
  source 1..20: mol_type = other DNA
gggaaccacaataacgtttt

SEQ ID NO: 47175 - DNA, 20 bp, synthetic construct
  misc_feature 1..20: note = chemically synthesized
  source 1..20: mol_type = other DNA
caataacgttttgggtaccc

SEQ ID NO: 47176 - DNA, 20 bp, synthetic construct
  misc_feature 1..20: note = chemically synthesized
  source 1..20: mol_type = other DNA
gggtaccctggaatcaacgt

SEQ ID NO: 47177 - DNA, 20 bp, synthetic construct
  misc_feature 1..20: note = chemically synthesized
  source 1..20: mol_type = other DNA
ccctggaatcaacgtcagct

SEQ ID NO: 47178 - DNA, 20 bp, synthetic construct
  misc_feature 1..20: note = chemically synthesized
  source 1..20: mol_type = other DNA
ctggaatcaacgtcagctca

SEQ ID NO: 47179 - DNA, 20 bp, synthetic construct
  misc_feature 1..20: note = chemically synthesized
  source 1..20: mol_type = other DNA
aatcaacgtcagctcagagc

SEQ ID NO: 47180 - DNA, 20 bp, synthetic construct
  misc_feature 1..20: note = chemically synthesized
  source 1..20: mol_type = other DNA
gtcagctcagagccagtgtc

SEQ ID NO: 47181 - DNA, 20 bp, synthetic construct
  misc_feature 1..20: note = chemically synthesized
  source 1..20: mol_type = other DNA
tctcattacttccctttctc

SEQ ID NO: 47182 - DNA, 20 bp, synthetic construct
  misc_feature 1..20: note = chemically synthesized
  source 1..20: mol_type = other DNA
ttccctttctccagtacaca

SEQ ID NO: 47183 - DNA, 20 bp, synthetic construct
  misc_feature 1..20: note = chemically synthesized
  source 1..20: mol_type = other DNA
tccagtacacacagttaccc

SEQ ID NO: 47184 - DNA, 20 bp, synthetic construct
  misc_feature 1..20: note = chemically synthesized
  source 1..20: mol_type = other DNA
acacacagttaccctggtaa

SEQ ID NO: 47185 - DNA, 20 bp, synthetic construct
  misc_feature 1..20: note = chemically synthesized
  source 1..20: mol_type = other DNA
cacacagttaccctggtaaa

SEQ ID NO: 47186 - DNA, 20 bp, synthetic construct
  misc_feature 1..20: note = chemically synthesized
  source 1..20: mol_type = other DNA
cagttaccctggtaaaaggc

SEQ ID NO: 47187 - DNA, 20 bp, synthetic construct
  misc_feature 1..20: note = chemically synthesized
  source 1..20: mol_type = other DNA
gttaccctggtaaaaggcca

SEQ ID NO: 47188 - DNA, 20 bp, synthetic construct
  misc_feature 1..20: note = chemically synthesized
  source 1..20: mol_type = other DNA
ttaccctggtaaaaggccag

SEQ ID NO: 47189 - DNA, 20 bp, synthetic construct
  misc_feature 1..20: note = chemically synthesized
  source 1..20: mol_type = other DNA
taaaaggccagaggtctcct

SEQ ID NO: 47190 - DNA, 20 bp, synthetic construct
  misc_feature 1..20: note = chemically synthesized
  source 1..20: mol_type = other DNA
aaaaggccagaggtctcctt

SEQ ID NO: 47191 - DNA, 20 bp, synthetic construct
  misc_feature 1..20: note = chemically synthesized
  source 1..20: mol_type = other DNA
aaaggccagaggtctcctta

SEQ ID NO: 47192 - DNA, 20 bp, synthetic construct
  misc_feature 1..20: note = chemically synthesized
  source 1..20: mol_type = other DNA
ggccagaggtctccttaggg

SEQ ID NO: 47193 - DNA, 20 bp, synthetic construct
  misc_feature 1..20: note = chemically synthesized
  source 1..20: mol_type = other DNA
gccagaggtctccttaggga

SEQ ID NO: 47194 - DNA, 20 bp, synthetic construct
  misc_feature 1..20: note = chemically synthesized
  source 1..20: mol_type = other DNA
gaggtctccttagggaagga

SEQ ID NO: 47195 - DNA, 20 bp, synthetic construct
  misc_feature 1..20: note = chemically synthesized
  source 1..20: mol_type = other DNA
aggtctccttagggaaggat

SEQ ID NO: 47196 - DNA, 20 bp, synthetic construct
  misc_feature 1..20: note = chemically synthesized
  source 1..20: mol_type = other DNA
gtctccttagggaaggatgg

SEQ ID NO: 47197 - DNA, 20 bp, synthetic construct
  misc_feature 1..20: note = chemically synthesized
  source 1..20: mol_type = other DNA
ccttagggaaggatgggaga

SEQ ID NO: 47198 - DNA, 20 bp, synthetic construct
  misc_feature 1..20: note = chemically synthesized
  source 1..20: mol_type = other DNA
ttagggaaggatgggagaaa

SEQ ID NO: 47199 - DNA, 20 bp, synthetic construct
  misc_feature 1..20: note = chemically synthesized
  source 1..20: mol_type = other DNA
aaggatgggagaaagagtaa

SEQ ID NO: 47200 - DNA, 20 bp, synthetic construct
  misc_feature 1..20: note = chemically synthesized
  source 1..20: mol_type = other DNA
gggagaaagagtaacagcat

SEQ ID NO: 47201 - DNA, 20 bp, synthetic construct
  misc_feature 1..20: note = chemically synthesized
  source 1..20: mol_type = other DNA
agagtaacagcataagttgt

SEQ ID NO: 47202 - DNA, 20 bp, synthetic construct
  misc_feature 1..20: note = chemically synthesized
  source 1..20: mol_type = other DNA
gtaacagcataagttgtcag

SEQ ID NO: 47203 - DNA, 20 bp, synthetic construct
  misc_feature 1..20: note = chemically synthesized
  source 1..20: mol_type = other DNA
agcataagttgtcagtagcc

SEQ ID NO: 47204 - DNA, 20 bp, synthetic construct
  misc_feature 1..20: note = chemically synthesized
  source 1..20: mol_type = other DNA
ataagttgtcagtagcctag

SEQ ID NO: 47205 - DNA, 20 bp, synthetic construct
  misc_feature 1..20: note = chemically synthesized
  source 1..20: mol_type = other DNA
gcctagtggtgtccttcctc

SEQ ID NO: 47206 - DNA, 20 bp, synthetic construct
  misc_feature 1..20: note = chemically synthesized
  source 1..20: mol_type = other DNA
cctagtggtgtccttcctca

SEQ ID NO: 47207 - DNA, 20 bp, synthetic construct
  misc_feature 1..20: note = chemically synthesized
  source 1..20: mol_type = other DNA
ctagtggtgtccttcctcaa

SEQ ID NO: 47208 - DNA, 20 bp, synthetic construct
  misc_feature 1..20: note = chemically synthesized
  source 1..20: mol_type = other DNA
tagtggtgtccttcctcaag

SEQ ID NO: 47209 - DNA, 20 bp, synthetic construct
  misc_feature 1..20: note = chemically synthesized
  source 1..20: mol_type = other DNA
tgtccttcctcaaggggatc

SEQ ID NO: 47210 - DNA, 20 bp, synthetic construct
  misc_feature 1..20: note = chemically synthesized
  source 1..20: mol_type = other DNA
gatccagcctccccttcatt

SEQ ID NO: 47211 - DNA, 20 bp, synthetic construct
  misc_feature 1..20: note = chemically synthesized
  source 1..20: mol_type = other DNA
ccagcctccccttcattcag

SEQ ID NO: 47212 - DNA, 20 bp, synthetic construct
  misc_feature 1..20: note = chemically synthesized
  source 1..20: mol_type = other DNA
cagcctccccttcattcagt

SEQ ID NO: 47213 - DNA, 20 bp, synthetic construct
  misc_feature 1..20: note = chemically synthesized
  source 1..20: mol_type = other DNA
ccccttcattcagtgggttc

SEQ ID NO: 47214 - DNA, 20 bp, synthetic construct
  misc_feature 1..20: note = chemically synthesized
  source 1..20: mol_type = other DNA
agtgggttctggaactgtaa

SEQ ID NO: 47215 - DNA, 20 bp, synthetic construct
  misc_feature 1..20: note = chemically synthesized
  source 1..20: mol_type = other DNA
gtgggttctggaactgtaac

SEQ ID NO: 47216 - DNA, 20 bp, synthetic construct
  misc_feature 1..20: note = chemically synthesized
  source 1..20: mol_type = other DNA
tctggaactgtaacaggttc

SEQ ID NO: 47217 - DNA, 20 bp, synthetic construct
  misc_feature 1..20: note = chemically synthesized
  source 1..20: mol_type = other DNA
aactgtaacaggttcgagtc

SEQ ID NO: 47218 - DNA, 20 bp, synthetic construct
  misc_feature 1..20: note = chemically synthesized
  source 1..20: mol_type = other DNA
ttcgagtctggaaattgatt

SEQ ID NO: 47219 - DNA, 20 bp, synthetic construct
  misc_feature 1..20: note = chemically synthesized
  source 1..20: mol_type = other DNA
tcgagtctggaaattgattg

SEQ ID NO: 47220 - DNA, 20 bp, synthetic construct
  misc_feature 1..20: note = chemically synthesized
  source 1..20: mol_type = other DNA
cgagtctggaaattgattga

SEQ ID NO: 47221 - DNA, 20 bp, synthetic construct
  misc_feature 1..20: note = chemically synthesized
  source 1..20: mol_type = other DNA
gattctctgtttttataatt

SEQ ID NO: 47222 - DNA, 20 bp, synthetic construct
  misc_feature 1..20: note = chemically synthesized
  source 1..20: mol_type = other DNA
tctgtttttataattcagat

SEQ ID NO: 47223 - DNA, 20 bp, synthetic construct
  misc_feature 1..20: note = chemically synthesized
  source 1..20: mol_type = other DNA
ttataattcagattagtctt

SEQ ID NO: 47224 - DNA, 20 bp, synthetic construct
  misc_feature 1..20: note = chemically synthesized
  source 1..20: mol_type = other DNA
agtctttagtccattctacc

SEQ ID NO: 47225 - DNA, 20 bp, synthetic construct
  misc_feature 1..20: note = chemically synthesized
  source 1..20: mol_type = other DNA
ctttagtccattctacctgg

SEQ ID NO: 47226 - DNA, 20 bp, synthetic construct
  misc_feature 1..20: note = chemically synthesized
  source 1..20: mol_type = other DNA
gttttttgtttatataaatc

SEQ ID NO: 47227 - DNA, 20 bp, synthetic construct
  misc_feature 1..20: note = chemically synthesized
  source 1..20: mol_type = other DNA
ttttgtttatataaatcaag

SEQ ID NO: 47228 - DNA, 20 bp, synthetic construct
  misc_feature 1..20: note = chemically synthesized
  source 1..20: mol_type = other DNA
tttgtttatataaatcaagt

SEQ ID NO: 47229 - DNA, 20 bp, synthetic construct
  misc_feature 1..20: note = chemically synthesized
  source 1..20: mol_type = other DNA
atataaatcaagtaggaata

SEQ ID NO: 47230 - DNA, 20 bp, synthetic construct
  misc_feature 1..20: note = chemically synthesized
  source 1..20: mol_type = other DNA
taaatcaagtaggaatacag

SEQ ID NO: 47231 - DNA, 20 bp, synthetic construct
  misc_feature 1..20: note = chemically synthesized
  source 1..20: mol_type = other DNA
aaatcaagtaggaatacagt

SEQ ID NO: 47232 - DNA, 20 bp, synthetic construct
  misc_feature 1..20: note = chemically synthesized
  source 1..20: mol_type = other DNA
tttcccatcaatttcacttc

SEQ ID NO: 47233 - DNA, 20 bp, synthetic construct
  misc_feature 1..20: note = chemically synthesized
  source 1..20: mol_type = other DNA
ttcccatcaatttcacttct

SEQ ID NO: 47234 - DNA, 20 bp, synthetic construct
  misc_feature 1..20: note = chemically synthesized
  source 1..20: mol_type = other DNA
ctaggaacaccatgattaat

SEQ ID NO: 47235 - DNA, 20 bp, synthetic construct
  misc_feature 1..20: note = chemically synthesized
  source 1..20: mol_type = other DNA
catgattaattagccaatgc

SEQ ID NO: 47236 - DNA, 20 bp, synthetic construct
  misc_feature 1..20: note = chemically synthesized
  source 1..20: mol_type = other DNA
tgattaattagccaatgcca

SEQ ID NO: 47237 - DNA, 20 bp, synthetic construct
  misc_feature 1..20: note = chemically synthesized
  source 1..20: mol_type = other DNA
ccaatgccagagctctacat

SEQ ID NO: 47238 - DNA, 20 bp, synthetic construct
  misc_feature 1..20: note = chemically synthesized
  source 1..20: mol_type = other DNA
tgccagagctctacatgagt

SEQ ID NO: 47239 - DNA, 20 bp, synthetic construct
  misc_feature 1..20: note = chemically synthesized
  source 1..20: mol_type = other DNA
catgagtcagactattctga

SEQ ID NO: 47240 - DNA, 20 bp, synthetic construct
  misc_feature 1..20: note = chemically synthesized
  source 1..20: mol_type = other DNA
tttgcctctgctgtctatta

SEQ ID NO: 47241 - DNA, 20 bp, synthetic construct
  misc_feature 1..20: note = chemically synthesized
  source 1..20: mol_type = other DNA
gcctctgctgtctattatgg

SEQ ID NO: 47242 - DNA, 20 bp, synthetic construct
  misc_feature 1..20: note = chemically synthesized
  source 1..20: mol_type = other DNA
tatgcccaccttgcctttga

SEQ ID NO: 47243 - DNA, 20 bp, synthetic construct
  misc_feature 1..20: note = chemically synthesized
  source 1..20: mol_type = other DNA
ccaccttgcctttgatggtt

SEQ ID NO: 47244 - DNA, 20 bp, synthetic construct
  misc_feature 1..20: note = chemically synthesized
  source 1..20: mol_type = other DNA
gatggttcagtgccaacact

SEQ ID NO: 47245 - DNA, 20 bp, synthetic construct
  misc_feature 1..20: note = chemically synthesized
  source 1..20: mol_type = other DNA
acacttggcccctgccacct

SEQ ID NO: 47246 - DNA, 20 bp, synthetic construct
  misc_feature 1..20: note = chemically synthesized
  source 1..20: mol_type = other DNA
cacttggcccctgccacctc

SEQ ID NO: 47247 - DNA, 20 bp, synthetic construct
  misc_feature 1..20: note = chemically synthesized
  source 1..20: mol_type = other DNA
cccattgtatttaaattttg

SEQ ID NO: 47248 - DNA, 20 bp, synthetic construct
  misc_feature 1..20: note = chemically synthesized
  source 1..20: mol_type = other DNA
tgtatttaaattttgtagtt

SEQ ID NO: 47249 - DNA, 20 bp, synthetic construct
  misc_feature 1..20: note = chemically synthesized
  source 1..20: mol_type = other DNA
attttgtagttgagtgactg

SEQ ID NO: 47250 - DNA, 20 bp, synthetic construct
  misc_feature 1..20: note = chemically synthesized
  source 1..20: mol_type = other DNA
gtgactgtggttcctactgt

SEQ ID NO: 47251 - DNA, 20 bp, synthetic construct
  misc_feature 1..20: note = chemically synthesized
  source 1..20: mol_type = other DNA
ctactgttagatctgacata

SEQ ID NO: 47252 - DNA, 20 bp, synthetic construct
  misc_feature 1..20: note = chemically synthesized
  source 1..20: mol_type = other DNA
actgttagatctgacataca

SEQ ID NO: 47253 - DNA, 20 bp, synthetic construct
  misc_feature 1..20: note = chemically synthesized
  source 1..20: mol_type = other DNA
gttagatctgacatacagag

SEQ ID NO: 47254 - DNA, 20 bp, synthetic construct
  misc_feature 1..20: note = chemically synthesized
  source 1..20: mol_type = other DNA
tagatctgacatacagagaa

SEQ ID NO: 47255 - DNA, 20 bp, synthetic construct
  misc_feature 1..20: note = chemically synthesized
  source 1..20: mol_type = other DNA
catacagagaagagcaatta

SEQ ID NO: 47256 - DNA, 20 bp, synthetic construct
  misc_feature 1..20: note = chemically synthesized
  source 1..20: mol_type = other DNA
atacagagaagagcaattac

SEQ ID NO: 47257 - DNA, 20 bp, synthetic construct
  misc_feature 1..20: note = chemically synthesized
  source 1..20: mol_type = other DNA
ttacgggctcttcaaaaata

SEQ ID NO: 47258 - DNA, 20 bp, synthetic construct
  misc_feature 1..20: note = chemically synthesized
  source 1..20: mol_type = other DNA
tacgggctcttcaaaaatac

SEQ ID NO: 47259 - DNA, 20 bp, synthetic construct
  misc_feature 1..20: note = chemically synthesized
  source 1..20: mol_type = other DNA
tctcacaaatctatttcaca

SEQ ID NO: 47260 - DNA, 20 bp, synthetic construct
  misc_feature 1..20: note = chemically synthesized
  source 1..20: mol_type = other DNA
aaatctatttcacaaagctt

SEQ ID NO: 47261 - DNA, 20 bp, synthetic construct
  misc_feature 1..20: note = chemically synthesized
  source 1..20: mol_type = other DNA
tatttcacaaagcttcggcc

SEQ ID NO: 47262 - DNA, 20 bp, synthetic construct
  misc_feature 1..20: note = chemically synthesized
  source 1..20: mol_type = other DNA
atttcacaaagcttcggcca

SEQ ID NO: 47263 - DNA, 20 bp, synthetic construct
  misc_feature 1..20: note = chemically synthesized
  source 1..20: mol_type = other DNA
tttcacaaagcttcggccaa

SEQ ID NO: 47264 - DNA, 20 bp, synthetic construct
  misc_feature 1..20: note = chemically synthesized
  source 1..20: mol_type = other DNA
tcggccaagggtgtatcttc

SEQ ID NO: 47265 - DNA, 20 bp, synthetic construct
  misc_feature 1..20: note = chemically synthesized
  source 1..20: mol_type = other DNA
gtgtatcttctggaccctcc

SEQ ID NO: 47266 - DNA, 20 bp, synthetic construct
  misc_feature 1..20: note = chemically synthesized
  source 1..20: mol_type = other DNA
atcttctggaccctcccagc

SEQ ID NO: 47267 - DNA, 20 bp, synthetic construct
  misc_feature 1..20: note = chemically synthesized
  source 1..20: mol_type = other DNA
tcttctggaccctcccagct

SEQ ID NO: 47268 - DNA, 20 bp, synthetic construct
  misc_feature 1..20: note = chemically synthesized
  source 1..20: mol_type = other DNA
tggaccctcccagctgggat

SEQ ID NO: 47269 - DNA, 20 bp, synthetic construct
  misc_feature 1..20: note = chemically synthesized
  source 1..20: mol_type = other DNA
accctcccagctgggatgag

SEQ ID NO: 47270 - DNA, 20 bp, synthetic construct
  misc_feature 1..20: note = chemically synthesized
  source 1..20: mol_type = other DNA
ccctcccagctgggatgagt

SEQ ID NO: 47271 - DNA, 20 bp, synthetic construct
  misc_feature 1..20: note = chemically synthesized
  source 1..20: mol_type = other DNA
agctgggatgagtaggtcta

SEQ ID NO: 47272 - DNA, 20 bp, synthetic construct
  misc_feature 1..20: note = chemically synthesized
  source 1..20: mol_type = other DNA
tccaccatcctaatctccct

SEQ ID NO: 47273 - DNA, 20 bp, synthetic construct
  misc_feature 1..20: note = chemically synthesized
  source 1..20: mol_type = other DNA
tcctaatctccctaagcctt

SEQ ID NO: 47274 - DNA, 20 bp, synthetic construct
  misc_feature 1..20: note = chemically synthesized
  source 1..20: mol_type = other DNA
cacttcctctacattaaacc

SEQ ID NO: 47275 - DNA, 20 bp, synthetic construct
  misc_feature 1..20: note = chemically synthesized
  source 1..20: mol_type = other DNA
acttcctctacattaaacca

SEQ ID NO: 47276 - DNA, 20 bp, synthetic construct
  misc_feature 1..20: note = chemically synthesized
  source 1..20: mol_type = other DNA
acattaaaccaaggcatttc

SEQ ID NO: 47277 - DNA, 20 bp, synthetic construct
  misc_feature 1..20: note = chemically synthesized
  source 1..20: mol_type = other DNA
catttccagctcactaacat

SEQ ID NO: 47278 - DNA, 20 bp, synthetic construct
  misc_feature 1..20: note = chemically synthesized
  source 1..20: mol_type = other DNA
ccatcttttaatccatattt

SEQ ID NO: 47279 - DNA, 20 bp, synthetic construct
  misc_feature 1..20: note = chemically synthesized
  source 1..20: mol_type = other DNA
aatccatatttcagctaacc

SEQ ID NO: 47280 - DNA, 20 bp, synthetic construct
  misc_feature 1..20: note = chemically synthesized
  source 1..20: mol_type = other DNA
aacttttttttttttttttt

SEQ ID NO: 47281 - DNA, 20 bp, synthetic construct
  misc_feature 1..20: note = chemically synthesized
  source 1..20: mol_type = other DNA
tttttttttttttttggaaa

SEQ ID NO: 47282 - DNA, 20 bp, synthetic construct
  misc_feature 1..20: note = chemically synthesized
  source 1..20: mol_type = other DNA
tttttttttttttggaaatg

SEQ ID NO: 47283 - DNA, 20 bp, synthetic construct
  misc_feature 1..20: note = chemically synthesized
  source 1..20: mol_type = other DNA
atggagtcttgctctgttac

SEQ ID NO: 47284 - DNA, 20 bp, synthetic construct
  misc_feature 1..20: note = chemically synthesized
  source 1..20: mol_type = other DNA
tggagtcttgctctgttacc

SEQ ID NO: 47285 - DNA, 20 bp, synthetic construct
  misc_feature 1..20: note = chemically synthesized
  source 1..20: mol_type = other DNA
gtcttgctctgttaccaggc

SEQ ID NO: 47286 - DNA, 20 bp, synthetic construct
  misc_feature 1..20: note = chemically synthesized
  source 1..20: mol_type = other DNA
tctgttaccaggctggaatg

SEQ ID NO: 47287 - DNA, 20 bp, synthetic construct
  misc_feature 1..20: note = chemically synthesized
  source 1..20: mol_type = other DNA
gttaccaggctggaatgcag

SEQ ID NO: 47288 - DNA, 20 bp, synthetic construct
  misc_feature 1..20: note = chemically synthesized
  source 1..20: mol_type = other DNA
ttaccaggctggaatgcagt

SEQ ID NO: 47289 - DNA, 20 bp, synthetic construct
  misc_feature 1..20: note = chemically synthesized
  source 1..20: mol_type = other DNA
taccaggctggaatgcagtg

SEQ ID NO: 47290 - DNA, 20 bp, synthetic construct
  misc_feature 1..20: note = chemically synthesized
  source 1..20: mol_type = other DNA
ggaatgcagtggggcgatct

SEQ ID NO: 47291 - DNA, 20 bp, synthetic construct
  misc_feature 1..20: note = chemically synthesized
  source 1..20: mol_type = other DNA
tcactgcaatctctgcctca

SEQ ID NO: 47292 - DNA, 20 bp, synthetic construct
  misc_feature 1..20: note = chemically synthesized
  source 1..20: mol_type = other DNA
cactgcaatctctgcctcac

SEQ ID NO: 47293 - DNA, 20 bp, synthetic construct
  misc_feature 1..20: note = chemically synthesized
  source 1..20: mol_type = other DNA
aatctctgcctcacaggttc

SEQ ID NO: 47294 - DNA, 20 bp, synthetic construct
  misc_feature 1..20: note = chemically synthesized
  source 1..20: mol_type = other DNA
ctctgcctcacaggttcaag

SEQ ID NO: 47295 - DNA, 20 bp, synthetic construct
  misc_feature 1..20: note = chemically synthesized
  source 1..20: mol_type = other DNA
ttcaagcagttctcttgcct

SEQ ID NO: 47296 - DNA, 20 bp, synthetic construct
  misc_feature 1..20: note = chemically synthesized
  source 1..20: mol_type = other DNA
ttctcttgcctcagcctccc

SEQ ID NO: 47297 - DNA, 20 bp, synthetic construct
  misc_feature 1..20: note = chemically synthesized
  source 1..20: mol_type = other DNA
tcttgcctcagcctcccaag

SEQ ID NO: 47298 - DNA, 20 bp, synthetic construct
  misc_feature 1..20: note = chemically synthesized
  source 1..20: mol_type = other DNA
cctcagcctcccaagtagat

SEQ ID NO: 47299 - DNA, 20 bp, synthetic construct
  misc_feature 1..20: note = chemically synthesized
  source 1..20: mol_type = other DNA
ctcccaagtagatgagatta

SEQ ID NO: 47300 - DNA, 20 bp, synthetic construct
  misc_feature 1..20: note = chemically synthesized
  source 1..20: mol_type = other DNA
cagttacgcatcaccatgcc

SEQ ID NO: 47301 - DNA, 20 bp, synthetic construct
  misc_feature 1..20: note = chemically synthesized
  source 1..20: mol_type = other DNA
ccagctaatttttgtatttt

SEQ ID NO: 47302 - DNA, 20 bp, synthetic construct
  misc_feature 1..20: note = chemically synthesized
  source 1..20: mol_type = other DNA
gctaatttttgtatttttag

SEQ ID NO: 47303 - DNA, 20 bp, synthetic construct
  misc_feature 1..20: note = chemically synthesized
  source 1..20: mol_type = other DNA
taatttttgtatttttagca

SEQ ID NO: 47304 - DNA, 20 bp, synthetic construct
  misc_feature 1..20: note = chemically synthesized
  source 1..20: mol_type = other DNA
ttttgtatttttagcagaga

SEQ ID NO: 47305 - DNA, 20 bp, synthetic construct
  misc_feature 1..20: note = chemically synthesized
  source 1..20: mol_type = other DNA
tttgtatttttagcagagat

SEQ ID NO: 47306 - DNA, 20 bp, synthetic construct
  misc_feature 1..20: note = chemically synthesized
  source 1..20: mol_type = other DNA
ttgtatttttagcagagatg

SEQ ID NO: 47307 - DNA, 20 bp, synthetic construct
  misc_feature 1..20: note = chemically synthesized
  source 1..20: mol_type = other DNA
gagatggggtttcaccattt

SEQ ID NO: 47308 - DNA, 20 bp, synthetic construct
  misc_feature 1..20: note = chemically synthesized
  source 1..20: mol_type = other DNA
tggggtttcaccattttagc

SEQ ID NO: 47309 - DNA, 20 bp, synthetic construct
  misc_feature 1..20: note = chemically synthesized
  source 1..20: mol_type = other DNA
tctgcccgcccccgcctccc

SEQ ID NO: 47310 - DNA, 20 bp, synthetic construct
  misc_feature 1..20: note = chemically synthesized
  source 1..20: mol_type = other DNA
ctgcccgcccccgcctccca

SEQ ID NO: 47311 - DNA, 20 bp, synthetic construct
  misc_feature 1..20: note = chemically synthesized
  source 1..20: mol_type = other DNA
gcccccgcctcccaaggtgc

SEQ ID NO: 47312 - DNA, 20 bp, synthetic construct
  misc_feature 1..20: note = chemically synthesized
  source 1..20: mol_type = other DNA
cccccgcctcccaaggtgct

SEQ ID NO: 47313 - DNA, 20 bp, synthetic construct
  misc_feature 1..20: note = chemically synthesized
  source 1..20: mol_type = other DNA
ctcccaaggtgctgggatta

SEQ ID NO: 47314 - DNA, 20 bp, synthetic construct
  misc_feature 1..20: note = chemically synthesized
  source 1..20: mol_type = other DNA
tcccaaggtgctgggattac

SEQ ID NO: 47315 - DNA, 20 bp, synthetic construct
  misc_feature 1..20: note = chemically synthesized
  source 1..20: mol_type = other DNA
ggtgctgggattacaggcgt

SEQ ID NO: 47316 - DNA, 20 bp, synthetic construct
  misc_feature 1..20: note = chemically synthesized
  source 1..20: mol_type = other DNA
caggcgtgagccactgctcc

SEQ ID NO: 47317 - DNA, 20 bp, synthetic construct
  misc_feature 1..20: note = chemically synthesized
  source 1..20: mol_type = other DNA
gccactgctcccggccctat

SEQ ID NO: 47318 - DNA, 20 bp, synthetic construct
  misc_feature 1..20: note = chemically synthesized
  source 1..20: mol_type = other DNA
gccctatcagaaccttttct

SEQ ID NO: 47319 - DNA, 20 bp, synthetic construct
  misc_feature 1..20: note = chemically synthesized
  source 1..20: mol_type = other DNA
agaaccttttctaagtcccc

SEQ ID NO: 47320 - DNA, 20 bp, synthetic construct
  misc_feature 1..20: note = chemically synthesized
  source 1..20: mol_type = other DNA
ccgagctgcaacattaaatg

SEQ ID NO: 47321 - DNA, 20 bp, synthetic construct
  misc_feature 1..20: note = chemically synthesized
  source 1..20: mol_type = other DNA
ttaaatgcagaatccctact

SEQ ID NO: 47322 - DNA, 20 bp, synthetic construct
  misc_feature 1..20: note = chemically synthesized
  source 1..20: mol_type = other DNA
aatgcagaatccctacttag

SEQ ID NO: 47323 - DNA, 20 bp, synthetic construct
  misc_feature 1..20: note = chemically synthesized
  source 1..20: mol_type = other DNA
atgcagaatccctacttagt

SEQ ID NO: 47324 - DNA, 20 bp, synthetic construct
  misc_feature 1..20: note = chemically synthesized
  source 1..20: mol_type = other DNA
tgcagaatccctacttagta

SEQ ID NO: 47325 - DNA, 20 bp, synthetic construct
  misc_feature 1..20: note = chemically synthesized
  source 1..20: mol_type = other DNA
tagggccaaaccaataaatt

SEQ ID NO: 47326 - DNA, 20 bp, synthetic construct
  misc_feature 1..20: note = chemically synthesized
  source 1..20: mol_type = other DNA
ccattcccatgcctgttctc

SEQ ID NO: 47327 - DNA, 20 bp, synthetic construct
  misc_feature 1..20: note = chemically synthesized
  source 1..20: mol_type = other DNA
agatttctgccaatataaat

SEQ ID NO: 47328 - DNA, 20 bp, synthetic construct
  misc_feature 1..20: note = chemically synthesized
  source 1..20: mol_type = other DNA
ttctgccaatataaattaga

SEQ ID NO: 47329 - DNA, 20 bp, synthetic construct
  misc_feature 1..20: note = chemically synthesized
  source 1..20: mol_type = other DNA
caatataaattagaaagctt

SEQ ID NO: 47330 - DNA, 20 bp, synthetic construct
  misc_feature 1..20: note = chemically synthesized
  source 1..20: mol_type = other DNA
tataaattagaaagcttaag

SEQ ID NO: 47331 - DNA, 20 bp, synthetic construct
  misc_feature 1..20: note = chemically synthesized
  source 1..20: mol_type = other DNA
gaaagcttaagcagttcttt

SEQ ID NO: 47332 - DNA, 20 bp, synthetic construct
  misc_feature 1..20: note = chemically synthesized
  source 1..20: mol_type = other DNA
aagcttaagcagttctttta

SEQ ID NO: 47333 - DNA, 20 bp, synthetic construct
  misc_feature 1..20: note = chemically synthesized
  source 1..20: mol_type = other DNA
gagtataatgcacctcctca

SEQ ID NO: 47334 - DNA, 20 bp, synthetic construct
  misc_feature 1..20: note = chemically synthesized
  source 1..20: mol_type = other DNA
agtataatgcacctcctcat

SEQ ID NO: 47335 - DNA, 20 bp, synthetic construct
  misc_feature 1..20: note = chemically synthesized
  source 1..20: mol_type = other DNA
cacactctgaacctcacctc

SEQ ID NO: 47336 - DNA, 20 bp, synthetic construct
  misc_feature 1..20: note = chemically synthesized
  source 1..20: mol_type = other DNA
acactctgaacctcacctct

SEQ ID NO: 47337 - DNA, 20 bp, synthetic construct
  misc_feature 1..20: note = chemically synthesized
  source 1..20: mol_type = other DNA
cactctgaacctcacctctg

SEQ ID NO: 47338 - DNA, 20 bp, synthetic construct
  misc_feature 1..20: note = chemically synthesized
  source 1..20: mol_type = other DNA
acctcacctctggggcccgc

SEQ ID NO: 47339 - DNA, 20 bp, synthetic construct
  misc_feature 1..20: note = chemically synthesized
  source 1..20: mol_type = other DNA
cctcacctctggggcccgca

SEQ ID NO: 47340 - DNA, 20 bp, synthetic construct
  misc_feature 1..20: note = chemically synthesized
  source 1..20: mol_type = other DNA
tctggggcccgcaaggaatt

SEQ ID NO: 47341 - DNA, 20 bp, synthetic construct
  misc_feature 1..20: note = chemically synthesized
  source 1..20: mol_type = other DNA
ggcccgcaaggaatttagcc

SEQ ID NO: 47342 - DNA, 20 bp, synthetic construct
  misc_feature 1..20: note = chemically synthesized
  source 1..20: mol_type = other DNA
caaggaatttagcctagtta

SEQ ID NO: 47343 - DNA, 20 bp, synthetic construct
  misc_feature 1..20: note = chemically synthesized
  source 1..20: mol_type = other DNA
aaggaatttagcctagttat

SEQ ID NO: 47344 - DNA, 20 bp, synthetic construct
  misc_feature 1..20: note = chemically synthesized
  source 1..20: mol_type = other DNA
atttagcctagttataggtc

SEQ ID NO: 47345 - DNA, 20 bp, synthetic construct
  misc_feature 1..20: note = chemically synthesized
  source 1..20: mol_type = other DNA
tagcctagttataggtctag

SEQ ID NO: 47346 - DNA, 20 bp, synthetic construct
  misc_feature 1..20: note = chemically synthesized
  source 1..20: mol_type = other DNA
gttataggtctagaagcatt

SEQ ID NO: 47347 - DNA, 20 bp, synthetic construct
  misc_feature 1..20: note = chemically synthesized
  source 1..20: mol_type = other DNA
ttataggtctagaagcattc

SEQ ID NO: 47348 - DNA, 20 bp, synthetic construct
  misc_feature 1..20: note = chemically synthesized
  source 1..20: mol_type = other DNA
tataggtctagaagcattca

SEQ ID NO: 47349 - DNA, 20 bp, synthetic construct
  misc_feature 1..20: note = chemically synthesized
  source 1..20: mol_type = other DNA
ataggtctagaagcattcag

SEQ ID NO: 47350 - DNA, 20 bp, synthetic construct
  misc_feature 1..20: note = chemically synthesized
  source 1..20: mol_type = other DNA
ctagaagcattcaggggcat

SEQ ID NO: 47351 - DNA, 20 bp, synthetic construct
  misc_feature 1..20: note = chemically synthesized
  source 1..20: mol_type = other DNA
tagaagcattcaggggcatt

SEQ ID NO: 47352 - DNA, 20 bp, synthetic construct
  misc_feature 1..20: note = chemically synthesized
  source 1..20: mol_type = other DNA
agaagcattcaggggcatta

SEQ ID NO: 47353 - DNA, 20 bp, synthetic construct
  misc_feature 1..20: note = chemically synthesized
  source 1..20: mol_type = other DNA
gaagcattcaggggcattag

SEQ ID NO: 47354 - DNA, 20 bp, synthetic construct
  misc_feature 1..20: note = chemically synthesized
  source 1..20: mol_type = other DNA
gggcattaggggtgcctctt

SEQ ID NO: 47355 - DNA, 20 bp, synthetic construct
  misc_feature 1..20: note = chemically synthesized
  source 1..20: mol_type = other DNA
ggcattaggggtgcctcttg

SEQ ID NO: 47356 - DNA, 20 bp, synthetic construct
  misc_feature 1..20: note = chemically synthesized
  source 1..20: mol_type = other DNA
cattaggggtgcctcttgag

SEQ ID NO: 47357 - DNA, 20 bp, synthetic construct
  misc_feature 1..20: note = chemically synthesized
  source 1..20: mol_type = other DNA
agaatcaacattatcttgcc

SEQ ID NO: 47358 - DNA, 20 bp, synthetic construct
  misc_feature 1..20: note = chemically synthesized
  source 1..20: mol_type = other DNA
atcaacattatcttgcctgg

SEQ ID NO: 47359 - DNA, 20 bp, synthetic construct
  misc_feature 1..20: note = chemically synthesized
  source 1..20: mol_type = other DNA
atcttgcctggcagctgcct

SEQ ID NO: 47360 - DNA, 20 bp, synthetic construct
  misc_feature 1..20: note = chemically synthesized
  source 1..20: mol_type = other DNA
tcttgcctggcagctgcctc

SEQ ID NO: 47361 - DNA, 20 bp, synthetic construct
  misc_feature 1..20: note = chemically synthesized
  source 1..20: mol_type = other DNA
cttgcctggcagctgcctca

SEQ ID NO: 47362 - DNA, 20 bp, synthetic construct
  misc_feature 1..20: note = chemically synthesized
  source 1..20: mol_type = other DNA
gcctggcagctgcctcaggg

SEQ ID NO: 47363 - DNA, 20 bp, synthetic construct
  misc_feature 1..20: note = chemically synthesized
  source 1..20: mol_type = other DNA
cctggcagctgcctcaggga

SEQ ID NO: 47364 - DNA, 20 bp, synthetic construct
  misc_feature 1..20: note = chemically synthesized
  source 1..20: mol_type = other DNA
aaggccatcactgttgcctc

SEQ ID NO: 47365 - DNA, 20 bp, synthetic construct
  misc_feature 1..20: note = chemically synthesized
  source 1..20: mol_type = other DNA
gccatcactgttgcctcaag

SEQ ID NO: 47366 - DNA, 20 bp, synthetic construct
  misc_feature 1..20: note = chemically synthesized
  source 1..20: mol_type = other DNA
cactgttgcctcaagcagtg

SEQ ID NO: 47367 - DNA, 20 bp, synthetic construct
  misc_feature 1..20: note = chemically synthesized
  source 1..20: mol_type = other DNA
actgttgcctcaagcagtgc

SEQ ID NO: 47368 - DNA, 20 bp, synthetic construct
  misc_feature 1..20: note = chemically synthesized
  source 1..20: mol_type = other DNA
ctgttgcctcaagcagtgca

SEQ ID NO: 47369 - DNA, 20 bp, synthetic construct
  misc_feature 1..20: note = chemically synthesized
  source 1..20: mol_type = other DNA
cagtgcagggtttacatcct

SEQ ID NO: 47370 - DNA, 20 bp, synthetic construct
  misc_feature 1..20: note = chemically synthesized
  source 1..20: mol_type = other DNA
agggtttacatcctcagaca

SEQ ID NO: 47371 - DNA, 20 bp, synthetic construct
  misc_feature 1..20: note = chemically synthesized
  source 1..20: mol_type = other DNA
gggtttacatcctcagacaa

SEQ ID NO: 47372 - DNA, 20 bp, synthetic construct
  misc_feature 1..20: note = chemically synthesized
  source 1..20: mol_type = other DNA
tttacatcctcagacaaagg

SEQ ID NO: 47373 - DNA, 20 bp, synthetic construct
  misc_feature 1..20: note = chemically synthesized
  source 1..20: mol_type = other DNA
catcctcagacaaaggtgga

SEQ ID NO: 47374 - DNA, 20 bp, synthetic construct
  misc_feature 1..20: note = chemically synthesized
  source 1..20: mol_type = other DNA
atcctcagacaaaggtggaa

SEQ ID NO: 47375 - DNA, 20 bp, synthetic construct
  misc_feature 1..20: note = chemically synthesized
  source 1..20: mol_type = other DNA
gacaaaggtggaaaggctaa

SEQ ID NO: 47376 - DNA, 20 bp, synthetic construct
  misc_feature 1..20: note = chemically synthesized
  source 1..20: mol_type = other DNA
aaaggtggaaaggctaatgg

SEQ ID NO: 47377 - DNA, 20 bp, synthetic construct
  misc_feature 1..20: note = chemically synthesized
  source 1..20: mol_type = other DNA
tggaaaggctaatggcagca

SEQ ID NO: 47378 - DNA, 20 bp, synthetic construct
  misc_feature 1..20: note = chemically synthesized
  source 1..20: mol_type = other DNA
ggaaaggctaatggcagcac

SEQ ID NO: 47379 - DNA, 20 bp, synthetic construct
  misc_feature 1..20: note = chemically synthesized
  source 1..20: mol_type = other DNA
aggctaatggcagcacgggt

SEQ ID NO: 47380 - DNA, 20 bp, synthetic construct
  misc_feature 1..20: note = chemically synthesized
  source 1..20: mol_type = other DNA
ggctaatggcagcacgggtc

SEQ ID NO: 47381 - DNA, 20 bp, synthetic construct
  misc_feature 1..20: note = chemically synthesized
  source 1..20: mol_type = other DNA
gctaatggcagcacgggtca

SEQ ID NO: 47382 - DNA, 20 bp, synthetic construct
  misc_feature 1..20: note = chemically synthesized
  source 1..20: mol_type = other DNA
taatggcagcacgggtcagg

SEQ ID NO: 47383 - DNA, 20 bp, synthetic construct
  misc_feature 1..20: note = chemically synthesized
  source 1..20: mol_type = other DNA
aatggcagcacgggtcaggg

SEQ ID NO: 47384 - DNA, 20 bp, synthetic construct
  misc_feature 1..20: note = chemically synthesized
  source 1..20: mol_type = other DNA
atggcagcacgggtcaggga

SEQ ID NO: 47385 - DNA, 20 bp, synthetic construct
  misc_feature 1..20: note = chemically synthesized
  source 1..20: mol_type = other DNA
tggcagcacgggtcagggag

SEQ ID NO: 47386 - DNA, 20 bp, synthetic construct
  misc_feature 1..20: note = chemically synthesized
  source 1..20: mol_type = other DNA
ggaggggatgttaccactac

SEQ ID NO: 47387 - DNA, 20 bp, synthetic construct
  misc_feature 1..20: note = chemically synthesized
  source 1..20: mol_type = other DNA
gaggggatgttaccactact

SEQ ID NO: 47388 - DNA, 20 bp, synthetic construct
  misc_feature 1..20: note = chemically synthesized
  source 1..20: mol_type = other DNA
aggggatgttaccactactg

SEQ ID NO: 47389 - DNA, 20 bp, synthetic construct
  misc_feature 1..20: note = chemically synthesized
  source 1..20: mol_type = other DNA
gatgttaccactactgggga

SEQ ID NO: 47390 - DNA, 20 bp, synthetic construct
  misc_feature 1..20: note = chemically synthesized
  source 1..20: mol_type = other DNA
atgttaccactactggggat

SEQ ID NO: 47391 - DNA, 20 bp, synthetic construct
  misc_feature 1..20: note = chemically synthesized
  source 1..20: mol_type = other DNA
tgttaccactactggggatg

SEQ ID NO: 47392 - DNA, 20 bp, synthetic construct
  misc_feature 1..20: note = chemically synthesized
  source 1..20: mol_type = other DNA
gatggggaaactgtttcttc

SEQ ID NO: 47393 - DNA, 20 bp, synthetic construct
  misc_feature 1..20: note = chemically synthesized
  source 1..20: mol_type = other DNA
aactgtttcttctggcaaaa

SEQ ID NO: 47394 - DNA, 20 bp, synthetic construct
  misc_feature 1..20: note = chemically synthesized
  source 1..20: mol_type = other DNA
ttctggcaaaaaagtttcat

SEQ ID NO: 47395 - DNA, 20 bp, synthetic construct
  misc_feature 1..20: note = chemically synthesized
  source 1..20: mol_type = other DNA
ctggcaaaaaagtttcatca

SEQ ID NO: 47396 - DNA, 20 bp, synthetic construct
  misc_feature 1..20: note = chemically synthesized
  source 1..20: mol_type = other DNA
ttcatcagagttcacaaact

SEQ ID NO: 47397 - DNA, 20 bp, synthetic construct
  misc_feature 1..20: note = chemically synthesized
  source 1..20: mol_type = other DNA
gttcacaaactcagtgtcct

SEQ ID NO: 47398 - DNA, 20 bp, synthetic construct
  misc_feature 1..20: note = chemically synthesized
  source 1..20: mol_type = other DNA
ctcagtgtcctcagcttcat

SEQ ID NO: 47399 - DNA, 20 bp, synthetic construct
  misc_feature 1..20: note = chemically synthesized
  source 1..20: mol_type = other DNA
tcagtgtcctcagcttcatc

SEQ ID NO: 47400 - DNA, 20 bp, synthetic construct
  misc_feature 1..20: note = chemically synthesized
  source 1..20: mol_type = other DNA
cagtgtcctcagcttcatca

SEQ ID NO: 47401 - DNA, 20 bp, synthetic construct
  misc_feature 1..20: note = chemically synthesized
  source 1..20: mol_type = other DNA
ctcccacacatccccactcc

SEQ ID NO: 47402 - DNA, 20 bp, synthetic construct
  misc_feature 1..20: note = chemically synthesized
  source 1..20: mol_type = other DNA
cacatccccactccaagttc

SEQ ID NO: 47403 - DNA, 20 bp, synthetic construct
  misc_feature 1..20: note = chemically synthesized
  source 1..20: mol_type = other DNA
acatccccactccaagttcc

SEQ ID NO: 47404 - DNA, 20 bp, synthetic construct
  misc_feature 1..20: note = chemically synthesized
  source 1..20: mol_type = other DNA
catccccactccaagttcca

SEQ ID NO: 47405 - DNA, 20 bp, synthetic construct
  misc_feature 1..20: note = chemically synthesized
  source 1..20: mol_type = other DNA
tccagggtcccatttttttc

SEQ ID NO: 47406 - DNA, 20 bp, synthetic construct
  misc_feature 1..20: note = chemically synthesized
  source 1..20: mol_type = other DNA
agtcaatgccctcactttaa

SEQ ID NO: 47407 - DNA, 20 bp, synthetic construct
  misc_feature 1..20: note = chemically synthesized
  source 1..20: mol_type = other DNA
tcactttaacagtaaacacc

SEQ ID NO: 47408 - DNA, 20 bp, synthetic construct
  misc_feature 1..20: note = chemically synthesized
  source 1..20: mol_type = other DNA
tttaacagtaaacacctggc

SEQ ID NO: 47409 - DNA, 20 bp, synthetic construct
  misc_feature 1..20: note = chemically synthesized
  source 1..20: mol_type = other DNA
ttaacagtaaacacctggca

SEQ ID NO: 47410 - DNA, 20 bp, synthetic construct
  misc_feature 1..20: note = chemically synthesized
  source 1..20: mol_type = other DNA
tgtgcatgcacctcttgttg

SEQ ID NO: 47411 - DNA, 20 bp, synthetic construct
  misc_feature 1..20: note = chemically synthesized
  source 1..20: mol_type = other DNA
atgcacctcttgttgcagat

SEQ ID NO: 47412 - DNA, 20 bp, synthetic construct
  misc_feature 1..20: note = chemically synthesized
  source 1..20: mol_type = other DNA
atcagctactcgcatgataa

SEQ ID NO: 47413 - DNA, 20 bp, synthetic construct
  misc_feature 1..20: note = chemically synthesized
  source 1..20: mol_type = other DNA
caatttcaactctttctcta

SEQ ID NO: 47414 - DNA, 20 bp, synthetic construct
  misc_feature 1..20: note = chemically synthesized
  source 1..20: mol_type = other DNA
aatttcaactctttctctac

SEQ ID NO: 47415 - DNA, 20 bp, synthetic construct
  misc_feature 1..20: note = chemically synthesized
  source 1..20: mol_type = other DNA
tttcaactctttctctacag

SEQ ID NO: 47416 - DNA, 20 bp, synthetic construct
  misc_feature 1..20: note = chemically synthesized
  source 1..20: mol_type = other DNA
caggagttaaaactctcatt

SEQ ID NO: 47417 - DNA, 20 bp, synthetic construct
  misc_feature 1..20: note = chemically synthesized
  source 1..20: mol_type = other DNA
aggagttaaaactctcattc

SEQ ID NO: 47418 - DNA, 20 bp, synthetic construct
  misc_feature 1..20: note = chemically synthesized
  source 1..20: mol_type = other DNA
ggagttaaaactctcattca

SEQ ID NO: 47419 - DNA, 20 bp, synthetic construct
  misc_feature 1..20: note = chemically synthesized
  source 1..20: mol_type = other DNA
actctcattcagggcaatct

SEQ ID NO: 47420 - DNA, 20 bp, synthetic construct
  misc_feature 1..20: note = chemically synthesized
  source 1..20: mol_type = other DNA
ctcattcagggcaatcttag

SEQ ID NO: 47421 - DNA, 20 bp, synthetic construct
  misc_feature 1..20: note = chemically synthesized
  source 1..20: mol_type = other DNA
gggcaatcttagcagatttg

SEQ ID NO: 47422 - DNA, 20 bp, synthetic construct
  misc_feature 1..20: note = chemically synthesized
  source 1..20: mol_type = other DNA
atcttagcagatttgtggct

SEQ ID NO: 47423 - DNA, 20 bp, synthetic construct
  misc_feature 1..20: note = chemically synthesized
  source 1..20: mol_type = other DNA
tggctcagtatctgcttctg

SEQ ID NO: 47424 - DNA, 20 bp, synthetic construct
  misc_feature 1..20: note = chemically synthesized
  source 1..20: mol_type = other DNA
ggctcagtatctgcttctga

SEQ ID NO: 47425 - DNA, 20 bp, synthetic construct
  misc_feature 1..20: note = chemically synthesized
  source 1..20: mol_type = other DNA
tcagtatctgcttctgaagg

SEQ ID NO: 47426 - DNA, 20 bp, synthetic construct
  misc_feature 1..20: note = chemically synthesized
  source 1..20: mol_type = other DNA
cagtatctgcttctgaaggt

SEQ ID NO: 47427 - DNA, 20 bp, synthetic construct
  misc_feature 1..20: note = chemically synthesized
  source 1..20: mol_type = other DNA
gtatctgcttctgaaggtgg

SEQ ID NO: 47428 - DNA, 20 bp, synthetic construct
  misc_feature 1..20: note = chemically synthesized
  source 1..20: mol_type = other DNA
ctgcttctgaaggtgggaga

SEQ ID NO: 47429 - DNA, 20 bp, synthetic construct
  misc_feature 1..20: note = chemically synthesized
  source 1..20: mol_type = other DNA
aggtgggagacagatcccct

SEQ ID NO: 47430 - DNA, 20 bp, synthetic construct
  misc_feature 1..20: note = chemically synthesized
  source 1..20: mol_type = other DNA
ttttctttcatctctttctc

SEQ ID NO: 47431 - DNA, 20 bp, synthetic construct
  misc_feature 1..20: note = chemically synthesized
  source 1..20: mol_type = other DNA
ttctttcatctctttctcca

SEQ ID NO: 47432 - DNA, 20 bp, synthetic construct
  misc_feature 1..20: note = chemically synthesized
  source 1..20: mol_type = other DNA
atctctttctccagagaact

SEQ ID NO: 47433 - DNA, 20 bp, synthetic construct
  misc_feature 1..20: note = chemically synthesized
  source 1..20: mol_type = other DNA
tctctttctccagagaactt

SEQ ID NO: 47434 - DNA, 20 bp, synthetic construct
  misc_feature 1..20: note = chemically synthesized
  source 1..20: mol_type = other DNA
tctttctccagagaacttag

SEQ ID NO: 47435 - DNA, 20 bp, synthetic construct
  misc_feature 1..20: note = chemically synthesized
  source 1..20: mol_type = other DNA
accaacttcattatgttcct

SEQ ID NO: 47436 - DNA, 20 bp, synthetic construct
  misc_feature 1..20: note = chemically synthesized
  source 1..20: mol_type = other DNA
gttccttggttctccacata

SEQ ID NO: 47437 - DNA, 20 bp, synthetic construct
  misc_feature 1..20: note = chemically synthesized
  source 1..20: mol_type = other DNA
tggttctccacatatagtca

SEQ ID NO: 47438 - DNA, 20 bp, synthetic construct
  misc_feature 1..20: note = chemically synthesized
  source 1..20: mol_type = other DNA
ggttctccacatatagtcaa

SEQ ID NO: 47439 - DNA, 20 bp, synthetic construct
  misc_feature 1..20: note = chemically synthesized
  source 1..20: mol_type = other DNA
atagtcaaaggtattatgta

SEQ ID NO: 47440 - DNA, 20 bp, synthetic construct
  misc_feature 1..20: note = chemically synthesized
  source 1..20: mol_type = other DNA
agtcaaaggtattatgtata

SEQ ID NO: 47441 - DNA, 20 bp, synthetic construct
  misc_feature 1..20: note = chemically synthesized
  source 1..20: mol_type = other DNA
ctaaactccttgcctctcat

SEQ ID NO: 47442 - DNA, 20 bp, synthetic construct
  misc_feature 1..20: note = chemically synthesized
  source 1..20: mol_type = other DNA
gcctctcataagtgatgaat

SEQ ID NO: 47443 - DNA, 20 bp, synthetic construct
  misc_feature 1..20: note = chemically synthesized
  source 1..20: mol_type = other DNA
tctcataagtgatgaatcag

SEQ ID NO: 47444 - DNA, 20 bp, synthetic construct
  misc_feature 1..20: note = chemically synthesized
  source 1..20: mol_type = other DNA
gcataactctctaaacaatt

SEQ ID NO: 47445 - DNA, 20 bp, synthetic construct
  misc_feature 1..20: note = chemically synthesized
  source 1..20: mol_type = other DNA
cataactctctaaacaattc

SEQ ID NO: 47446 - DNA, 20 bp, synthetic construct
  misc_feature 1..20: note = chemically synthesized
  source 1..20: mol_type = other DNA
ctctctaaacaattcaggcc

SEQ ID NO: 47447 - DNA, 20 bp, synthetic construct
  misc_feature 1..20: note = chemically synthesized
  source 1..20: mol_type = other DNA
caattcaggccaagtactat

SEQ ID NO: 47448 - DNA, 20 bp, synthetic construct
  misc_feature 1..20: note = chemically synthesized
  source 1..20: mol_type = other DNA
atcagtgttctccatactat

SEQ ID NO: 47449 - DNA, 20 bp, synthetic construct
  misc_feature 1..20: note = chemically synthesized
  source 1..20: mol_type = other DNA
agtgttctccatactattag

SEQ ID NO: 47450 - DNA, 20 bp, synthetic construct
  misc_feature 1..20: note = chemically synthesized
  source 1..20: mol_type = other DNA
gttctccatactattagaag

SEQ ID NO: 47451 - DNA, 20 bp, synthetic construct
  misc_feature 1..20: note = chemically synthesized
  source 1..20: mol_type = other DNA
tctccatactattagaagta

SEQ ID NO: 47452 - DNA, 20 bp, synthetic construct
  misc_feature 1..20: note = chemically synthesized
  source 1..20: mol_type = other DNA
actattagaagtagagtcct

SEQ ID NO: 47453 - DNA, 20 bp, synthetic construct
  misc_feature 1..20: note = chemically synthesized
  source 1..20: mol_type = other DNA
gtagagtccttagcattttt

SEQ ID NO: 47454 - DNA, 20 bp, synthetic construct
  misc_feature 1..20: note = chemically synthesized
  source 1..20: mol_type = other DNA
tttggtctaatcatattaat

SEQ ID NO: 47455 - DNA, 20 bp, synthetic construct
  misc_feature 1..20: note = chemically synthesized
  source 1..20: mol_type = other DNA
tcatattaatcagccaacac

SEQ ID NO: 47456 - DNA, 20 bp, synthetic construct
  misc_feature 1..20: note = chemically synthesized
  source 1..20: mol_type = other DNA
tattaatcagccaacaccag

SEQ ID NO: 47457 - DNA, 20 bp, synthetic construct
  misc_feature 1..20: note = chemically synthesized
  source 1..20: mol_type = other DNA
agaagtcccaaaaccaatga

SEQ ID NO: 47458 - DNA, 20 bp, synthetic construct
  misc_feature 1..20: note = chemically synthesized
  source 1..20: mol_type = other DNA
tccttaatattctgttcctc

SEQ ID NO: 47459 - DNA, 20 bp, synthetic construct
  misc_feature 1..20: note = chemically synthesized
  source 1..20: mol_type = other DNA
tgttcctcaagaaccacttc

SEQ ID NO: 47460 - DNA, 20 bp, synthetic construct
  misc_feature 1..20: note = chemically synthesized
  source 1..20: mol_type = other DNA
tctggtatgaaaatctgtat

SEQ ID NO: 47461 - DNA, 20 bp, synthetic construct
  misc_feature 1..20: note = chemically synthesized
  source 1..20: mol_type = other DNA
gtatgaaaatctgtattagt

SEQ ID NO: 47462 - DNA, 20 bp, synthetic construct
  misc_feature 1..20: note = chemically synthesized
  source 1..20: mol_type = other DNA
tatgaaaatctgtattagtc

SEQ ID NO: 47463 - DNA, 20 bp, synthetic construct
  misc_feature 1..20: note = chemically synthesized
  source 1..20: mol_type = other DNA
atgaaaatctgtattagtcg

SEQ ID NO: 47464 - DNA, 20 bp, synthetic construct
  misc_feature 1..20: note = chemically synthesized
  source 1..20: mol_type = other DNA
ctgtattagtcggggttctc

SEQ ID NO: 47465 - DNA, 20 bp, synthetic construct
  misc_feature 1..20: note = chemically synthesized
  source 1..20: mol_type = other DNA
gtattagtcggggttctcta

SEQ ID NO: 47466 - DNA, 20 bp, synthetic construct
  misc_feature 1..20: note = chemically synthesized
  source 1..20: mol_type = other DNA
tattagtcggggttctctag

SEQ ID NO: 47467 - DNA, 20 bp, synthetic construct
  misc_feature 1..20: note = chemically synthesized
  source 1..20: mol_type = other DNA
attagtcggggttctctaga

SEQ ID NO: 47468 - DNA, 20 bp, synthetic construct
  misc_feature 1..20: note = chemically synthesized
  source 1..20: mol_type = other DNA
gtcggggttctctagaggga

SEQ ID NO: 47469 - DNA, 20 bp, synthetic construct
  misc_feature 1..20: note = chemically synthesized
  source 1..20: mol_type = other DNA
ctctagagggacagaactaa

SEQ ID NO: 47470 - DNA, 20 bp, synthetic construct
  misc_feature 1..20: note = chemically synthesized
  source 1..20: mol_type = other DNA
tctagagggacagaactaat

SEQ ID NO: 47471 - DNA, 20 bp, synthetic construct
  misc_feature 1..20: note = chemically synthesized
  source 1..20: mol_type = other DNA
tagagggacagaactaatag

SEQ ID NO: 47472 - DNA, 20 bp, synthetic construct
  misc_feature 1..20: note = chemically synthesized
  source 1..20: mol_type = other DNA
gattatatatatatatatat

SEQ ID NO: 47473 - DNA, 20 bp, synthetic construct
  misc_feature 1..20: note = chemically synthesized
  source 1..20: mol_type = other DNA
ttatatatatatatatatga

SEQ ID NO: 47474 - DNA, 20 bp, synthetic construct
  misc_feature 1..20: note = chemically synthesized
  source 1..20: mol_type = other DNA
atatatatatatatatgaga

SEQ ID NO: 47475 - DNA, 20 bp, synthetic construct
  misc_feature 1..20: note = chemically synthesized
  source 1..20: mol_type = other DNA
atatatatatatatgagaga

SEQ ID NO: 47476 - DNA, 20 bp, synthetic construct
  misc_feature 1..20: note = chemically synthesized
  source 1..20: mol_type = other DNA
atatatatatatgagagaga

SEQ ID NO: 47477 - DNA, 20 bp, synthetic construct
  misc_feature 1..20: note = chemically synthesized
  source 1..20: mol_type = other DNA
atatatatatgagagagaga

SEQ ID NO: 47478 - DNA, 20 bp, synthetic construct
  misc_feature 1..20: note = chemically synthesized
  source 1..20: mol_type = other DNA
atatatatgagagagagaga

SEQ ID NO: 47479 - DNA, 20 bp, synthetic construct
  misc_feature 1..20: note = chemically synthesized
  source 1..20: mol_type = other DNA
atatatgagagagagagaga

SEQ ID NO: 47480 - DNA, 20 bp, synthetic construct
  misc_feature 1..20: note = chemically synthesized
  source 1..20: mol_type = other DNA
atatgagagagagagagaga

SEQ ID NO: 47481 - DNA, 20 bp, synthetic construct
  misc_feature 1..20: note = chemically synthesized
  source 1..20: mol_type = other DNA
tatgtatatatgtgtatata

SEQ ID NO: 47482 - DNA, 20 bp, synthetic construct
  misc_feature 1..20: note = chemically synthesized
  source 1..20: mol_type = other DNA
tatatatgtgtatatatagt

SEQ ID NO: 47483 - DNA, 20 bp, synthetic construct
  misc_feature 1..20: note = chemically synthesized
  source 1..20: mol_type = other DNA
agtatacctatatctatcta

SEQ ID NO: 47484 - DNA, 20 bp, synthetic construct
  misc_feature 1..20: note = chemically synthesized
  source 1..20: mol_type = other DNA
cctatatctatctatagata

SEQ ID NO: 47485 - DNA, 20 bp, synthetic construct
  misc_feature 1..20: note = chemically synthesized
  source 1..20: mol_type = other DNA
gatatagatatactcacaca

SEQ ID NO: 47486 - DNA, 20 bp, synthetic construct
  misc_feature 1..20: note = chemically synthesized
  source 1..20: mol_type = other DNA
atatagatatactcacacaa

SEQ ID NO: 47487 - DNA, 20 bp, synthetic construct
  misc_feature 1..20: note = chemically synthesized
  source 1..20: mol_type = other DNA
tatagatatactcacacaaa

SEQ ID NO: 47488 - DNA, 20 bp, synthetic construct
  misc_feature 1..20: note = chemically synthesized
  source 1..20: mol_type = other DNA
atagatatactcacacaaag

SEQ ID NO: 47489 - DNA, 20 bp, synthetic construct
  misc_feature 1..20: note = chemically synthesized
  source 1..20: mol_type = other DNA
agatatactcacacaaaggg

SEQ ID NO: 47490 - DNA, 20 bp, synthetic construct
  misc_feature 1..20: note = chemically synthesized
  source 1..20: mol_type = other DNA
cacacaaaggggagcttatt

SEQ ID NO: 47491 - DNA, 20 bp, synthetic construct
  misc_feature 1..20: note = chemically synthesized
  source 1..20: mol_type = other DNA
acaaaggggagcttattaag

SEQ ID NO: 47492 - DNA, 20 bp, synthetic construct
  misc_feature 1..20: note = chemically synthesized
  source 1..20: mol_type = other DNA
attaagtggtattaactcac

SEQ ID NO: 47493 - DNA, 20 bp, synthetic construct
  misc_feature 1..20: note = chemically synthesized
  source 1..20: mol_type = other DNA
gtattaactcacaagattac

SEQ ID NO: 47494 - DNA, 20 bp, synthetic construct
  misc_feature 1..20: note = chemically synthesized
  source 1..20: mol_type = other DNA
tattaactcacaagattaca

SEQ ID NO: 47495 - DNA, 20 bp, synthetic construct
  misc_feature 1..20: note = chemically synthesized
  source 1..20: mol_type = other DNA
aagattacaaggtcccataa

SEQ ID NO: 47496 - DNA, 20 bp, synthetic construct
  misc_feature 1..20: note = chemically synthesized
  source 1..20: mol_type = other DNA
agattacaaggtcccataat

SEQ ID NO: 47497 - DNA, 20 bp, synthetic construct
  misc_feature 1..20: note = chemically synthesized
  source 1..20: mol_type = other DNA
taataggccacctgcaatct

SEQ ID NO: 47498 - DNA, 20 bp, synthetic construct
  misc_feature 1..20: note = chemically synthesized
  source 1..20: mol_type = other DNA
aataggccacctgcaatctg

SEQ ID NO: 47499 - DNA, 20 bp, synthetic construct
  misc_feature 1..20: note = chemically synthesized
  source 1..20: mol_type = other DNA
taggccacctgcaatctgag

SEQ ID NO: 47500 - DNA, 20 bp, synthetic construct
  misc_feature 1..20: note = chemically synthesized
  source 1..20: mol_type = other DNA
ccacctgcaatctgaggagc

SEQ ID NO: 47501 - DNA, 20 bp, synthetic construct
  misc_feature 1..20: note = chemically synthesized
  source 1..20: mol_type = other DNA
cacctgcaatctgaggagca

SEQ ID NO: 47502 - DNA, 20 bp, synthetic construct
  misc_feature 1..20: note = chemically synthesized
  source 1..20: mol_type = other DNA
ctgcaatctgaggagcaagg

SEQ ID NO: 47503 - DNA, 20 bp, synthetic construct
  misc_feature 1..20: note = chemically synthesized
  source 1..20: mol_type = other DNA
aatctgaggagcaaggaaga

SEQ ID NO: 47504 - DNA, 20 bp, synthetic construct
  misc_feature 1..20: note = chemically synthesized
  source 1..20: mol_type = other DNA
aggagcaaggaagacagtcc

SEQ ID NO: 47505 - DNA, 20 bp, synthetic construct
  misc_feature 1..20: note = chemically synthesized
  source 1..20: mol_type = other DNA
ggaagacagtccaagtccca

SEQ ID NO: 47506 - DNA, 20 bp, synthetic construct
  misc_feature 1..20: note = chemically synthesized
  source 1..20: mol_type = other DNA
cagtccaagtcccacagctg

SEQ ID NO: 47507 - DNA, 20 bp, synthetic construct
  misc_feature 1..20: note = chemically synthesized
  source 1..20: mol_type = other DNA
agtcccacagctgaagaact

SEQ ID NO: 47508 - DNA, 20 bp, synthetic construct
  misc_feature 1..20: note = chemically synthesized
  source 1..20: mol_type = other DNA
tcccacagctgaagaacttg

SEQ ID NO: 47509 - DNA, 20 bp, synthetic construct
  misc_feature 1..20: note = chemically synthesized
  source 1..20: mol_type = other DNA
gaacttggagtccgatgttc

SEQ ID NO: 47510 - DNA, 20 bp, synthetic construct
  misc_feature 1..20: note = chemically synthesized
  source 1..20: mol_type = other DNA
acttggagtccgatgttcaa

SEQ ID NO: 47511 - DNA, 20 bp, synthetic construct
  misc_feature 1..20: note = chemically synthesized
  source 1..20: mol_type = other DNA
tggagtccgatgttcaagag

SEQ ID NO: 47512 - DNA, 20 bp, synthetic construct
  misc_feature 1..20: note = chemically synthesized
  source 1..20: mol_type = other DNA
ggagtccgatgttcaagagc

SEQ ID NO: 47513 - DNA, 20 bp, synthetic construct
  misc_feature 1..20: note = chemically synthesized
  source 1..20: mol_type = other DNA
gtccgatgttcaagagcagg

SEQ ID NO: 47514 - DNA, 20 bp, synthetic construct
  misc_feature 1..20: note = chemically synthesized
  source 1..20: mol_type = other DNA
tccgatgttcaagagcagga

SEQ ID NO: 47515 - DNA, 20 bp, synthetic construct
  misc_feature 1..20: note = chemically synthesized
  source 1..20: mol_type = other DNA
gttcaagagcaggaaggatc

SEQ ID NO: 47516 - DNA, 20 bp, synthetic construct
  misc_feature 1..20: note = chemically synthesized
  source 1..20: mol_type = other DNA
agagcaggaaggatccagca

SEQ ID NO: 47517 - DNA, 20 bp, synthetic construct
  misc_feature 1..20: note = chemically synthesized
  source 1..20: mol_type = other DNA
gagcaggaaggatccagcac

SEQ ID NO: 47518 - DNA, 20 bp, synthetic construct
  misc_feature 1..20: note = chemically synthesized
  source 1..20: mol_type = other DNA
gcaggaaggatccagcacag

SEQ ID NO: 47519 - DNA, 20 bp, synthetic construct
  misc_feature 1..20: note = chemically synthesized
  source 1..20: mol_type = other DNA
gaaggatccagcacaggaga

SEQ ID NO: 47520 - DNA, 20 bp, synthetic construct
  misc_feature 1..20: note = chemically synthesized
  source 1..20: mol_type = other DNA
tccagcacaggagaaagatg

SEQ ID NO: 47521 - DNA, 20 bp, synthetic construct
  misc_feature 1..20: note = chemically synthesized
  source 1..20: mol_type = other DNA
ccagcacaggagaaagatgt

SEQ ID NO: 47522 - DNA, 20 bp, synthetic construct
  misc_feature 1..20: note = chemically synthesized
  source 1..20: mol_type = other DNA
cacaggagaaagatgtaggc

SEQ ID NO: 47523 - DNA, 20 bp, synthetic construct
  misc_feature 1..20: note = chemically synthesized
  source 1..20: mol_type = other DNA
acaggagaaagatgtaggct

SEQ ID NO: 47524 - DNA, 20 bp, synthetic construct
  misc_feature 1..20: note = chemically synthesized
  source 1..20: mol_type = other DNA
aggagaaagatgtaggctgg

SEQ ID NO: 47525 - DNA, 20 bp, synthetic construct
  misc_feature 1..20: note = chemically synthesized
  source 1..20: mol_type = other DNA
ggagaaagatgtaggctggg

SEQ ID NO: 47526 - DNA, 20 bp, synthetic construct
  misc_feature 1..20: note = chemically synthesized
  source 1..20: mol_type = other DNA
aagatgtaggctgggaggct

SEQ ID NO: 47527 - DNA, 20 bp, synthetic construct
  misc_feature 1..20: note = chemically synthesized
  source 1..20: mol_type = other DNA
tgtaggctgggaggctaagc

SEQ ID NO: 47528 - DNA, 20 bp, synthetic construct
  misc_feature 1..20: note = chemically synthesized
  source 1..20: mol_type = other DNA
gctgggaggctaagccagtc

SEQ ID NO: 47529 - DNA, 20 bp, synthetic construct
  misc_feature 1..20: note = chemically synthesized
  source 1..20: mol_type = other DNA
gcctttttacatttttctgc

SEQ ID NO: 47530 - DNA, 20 bp, synthetic construct
  misc_feature 1..20: note = chemically synthesized
  source 1..20: mol_type = other DNA
tttctgccagctttatattc

SEQ ID NO: 47531 - DNA, 20 bp, synthetic construct
  misc_feature 1..20: note = chemically synthesized
  source 1..20: mol_type = other DNA
agctttatattctggctcta

SEQ ID NO: 47532 - DNA, 20 bp, synthetic construct
  misc_feature 1..20: note = chemically synthesized
  source 1..20: mol_type = other DNA
tatattctggctctacagct

SEQ ID NO: 47533 - DNA, 20 bp, synthetic construct
  misc_feature 1..20: note = chemically synthesized
  source 1..20: mol_type = other DNA
atattctggctctacagctt

SEQ ID NO: 47534 - DNA, 20 bp, synthetic construct
  misc_feature 1..20: note = chemically synthesized
  source 1..20: mol_type = other DNA
tattctggctctacagcttg

SEQ ID NO: 47535 - DNA, 20 bp, synthetic construct
  misc_feature 1..20: note = chemically synthesized
  source 1..20: mol_type = other DNA
attctggctctacagcttgg

SEQ ID NO: 47536 - DNA, 20 bp, synthetic construct
  misc_feature 1..20: note = chemically synthesized
  source 1..20: mol_type = other DNA
ctggctctacagcttggggg

SEQ ID NO: 47537 - DNA, 20 bp, synthetic construct
  misc_feature 1..20: note = chemically synthesized
  source 1..20: mol_type = other DNA
gctctacagcttgggggcag

SEQ ID NO: 47538 - DNA, 20 bp, synthetic construct
  misc_feature 1..20: note = chemically synthesized
  source 1..20: mol_type = other DNA
ctctacagcttgggggcagc

SEQ ID NO: 47539 - DNA, 20 bp, synthetic construct
  misc_feature 1..20: note = chemically synthesized
  source 1..20: mol_type = other DNA
tctacagcttgggggcagca

SEQ ID NO: 47540 - DNA, 20 bp, synthetic construct
  misc_feature 1..20: note = chemically synthesized
  source 1..20: mol_type = other DNA
ctacagcttgggggcagcag

SEQ ID NO: 47541 - DNA, 20 bp, synthetic construct
  misc_feature 1..20: note = chemically synthesized
  source 1..20: mol_type = other DNA
cagcttgggggcagcagggg

SEQ ID NO: 47542 - DNA, 20 bp, synthetic construct
  misc_feature 1..20: note = chemically synthesized
  source 1..20: mol_type = other DNA
agcttgggggcagcaggggc

SEQ ID NO: 47543 - DNA, 20 bp, synthetic construct
  misc_feature 1..20: note = chemically synthesized
  source 1..20: mol_type = other DNA
gcttgggggcagcaggggca

SEQ ID NO: 47544 - DNA, 20 bp, synthetic construct
  misc_feature 1..20: note = chemically synthesized
  source 1..20: mol_type = other DNA
cttgggggcagcaggggcag

SEQ ID NO: 47545 - DNA, 20 bp, synthetic construct
  misc_feature 1..20: note = chemically synthesized
  source 1..20: mol_type = other DNA
ggcagcaggggcaggggcct

SEQ ID NO: 47546 - DNA, 20 bp, synthetic construct
  misc_feature 1..20: note = chemically synthesized
  source 1..20: mol_type = other DNA
gcagcaggggcaggggcctc

SEQ ID NO: 47547 - DNA, 20 bp, synthetic construct
  misc_feature 1..20: note = chemically synthesized
  source 1..20: mol_type = other DNA
cagcaggggcaggggcctca

SEQ ID NO: 47548 - DNA, 20 bp, synthetic construct
  misc_feature 1..20: note = chemically synthesized
  source 1..20: mol_type = other DNA
caggggcctcagggtgcttg

SEQ ID NO: 47549 - DNA, 20 bp, synthetic construct
  misc_feature 1..20: note = chemically synthesized
  source 1..20: mol_type = other DNA
aggggcctcagggtgcttgc

SEQ ID NO: 47550 - DNA, 20 bp, synthetic construct
  misc_feature 1..20: note = chemically synthesized
  source 1..20: mol_type = other DNA
ggggcctcagggtgcttgca

SEQ ID NO: 47551 - DNA, 20 bp, synthetic construct
  misc_feature 1..20: note = chemically synthesized
  source 1..20: mol_type = other DNA
tgcttgcagggatgacacac

SEQ ID NO: 47552 - DNA, 20 bp, synthetic construct
  misc_feature 1..20: note = chemically synthesized
  source 1..20: mol_type = other DNA
acacactggcctcttttcca

SEQ ID NO: 47553 - DNA, 20 bp, synthetic construct
  misc_feature 1..20: note = chemically synthesized
  source 1..20: mol_type = other DNA
cacactggcctcttttccat

SEQ ID NO: 47554 - DNA, 20 bp, synthetic construct
  misc_feature 1..20: note = chemically synthesized
  source 1..20: mol_type = other DNA
acactggcctcttttccata

SEQ ID NO: 47555 - DNA, 20 bp, synthetic construct
  misc_feature 1..20: note = chemically synthesized
  source 1..20: mol_type = other DNA
ctggcctcttttccataggg

SEQ ID NO: 47556 - DNA, 20 bp, synthetic construct
  misc_feature 1..20: note = chemically synthesized
  source 1..20: mol_type = other DNA
cctcttttccatagggtggc

SEQ ID NO: 47557 - DNA, 20 bp, synthetic construct
  misc_feature 1..20: note = chemically synthesized
  source 1..20: mol_type = other DNA
ctcttttccatagggtggct

SEQ ID NO: 47558 - DNA, 20 bp, synthetic construct
  misc_feature 1..20: note = chemically synthesized
  source 1..20: mol_type = other DNA
tcttttccatagggtggctg

SEQ ID NO: 47559 - DNA, 20 bp, synthetic construct
  misc_feature 1..20: note = chemically synthesized
  source 1..20: mol_type = other DNA
atagggtggctggggcacac

SEQ ID NO: 47560 - DNA, 20 bp, synthetic construct
  misc_feature 1..20: note = chemically synthesized
  source 1..20: mol_type = other DNA
tagggtggctggggcacact

SEQ ID NO: 47561 - DNA, 20 bp, synthetic construct
  misc_feature 1..20: note = chemically synthesized
  source 1..20: mol_type = other DNA
agggtggctggggcacactg

SEQ ID NO: 47562 - DNA, 20 bp, synthetic construct
  misc_feature 1..20: note = chemically synthesized
  source 1..20: mol_type = other DNA
gctggggcacactggggtgt

SEQ ID NO: 47563 - DNA, 20 bp, synthetic construct
  misc_feature 1..20: note = chemically synthesized
  source 1..20: mol_type = other DNA
ggcacactggggtgtgagta

SEQ ID NO: 47564 - DNA, 20 bp, synthetic construct
  misc_feature 1..20: note = chemically synthesized
  source 1..20: mol_type = other DNA
tggggtgtgagtaaagcact

SEQ ID NO: 47565 - DNA, 20 bp, synthetic construct
  misc_feature 1..20: note = chemically synthesized
  source 1..20: mol_type = other DNA
ggggtgtgagtaaagcactc

SEQ ID NO: 47566 - DNA, 20 bp, synthetic construct
  misc_feature 1..20: note = chemically synthesized
  source 1..20: mol_type = other DNA
caggatcttttttccttccc

SEQ ID NO: 47567 - DNA, 20 bp, synthetic construct
  misc_feature 1..20: note = chemically synthesized
  source 1..20: mol_type = other DNA
cttttttccttccctagtcc

SEQ ID NO: 47568 - DNA, 20 bp, synthetic construct
  misc_feature 1..20: note = chemically synthesized
  source 1..20: mol_type = other DNA
ttccttccctagtccaagta

SEQ ID NO: 47569 - DNA, 20 bp, synthetic construct
  misc_feature 1..20: note = chemically synthesized
  source 1..20: mol_type = other DNA
ttccctagtccaagtacagc

SEQ ID NO: 47570 - DNA, 20 bp, synthetic construct
  misc_feature 1..20: note = chemically synthesized
  source 1..20: mol_type = other DNA
tccctagtccaagtacagca

SEQ ID NO: 47571 - DNA, 20 bp, synthetic construct
  misc_feature 1..20: note = chemically synthesized
  source 1..20: mol_type = other DNA
ccctagtccaagtacagcaa

SEQ ID NO: 47572 - DNA, 20 bp, synthetic construct
  misc_feature 1..20: note = chemically synthesized
  source 1..20: mol_type = other DNA
tagtccaagtacagcaaggg

SEQ ID NO: 47573 - DNA, 20 bp, synthetic construct
  misc_feature 1..20: note = chemically synthesized
  source 1..20: mol_type = other DNA
cagcaagggcagtatgactg

SEQ ID NO: 47574 - DNA, 20 bp, synthetic construct
  misc_feature 1..20: note = chemically synthesized
  source 1..20: mol_type = other DNA
gggcagtatgactgcagtgt

SEQ ID NO: 47575 - DNA, 20 bp, synthetic construct
  misc_feature 1..20: note = chemically synthesized
  source 1..20: mol_type = other DNA
cagtatgactgcagtgttag

SEQ ID NO: 47576 - DNA, 20 bp, synthetic construct
  misc_feature 1..20: note = chemically synthesized
  source 1..20: mol_type = other DNA
tatgactgcagtgttagtgg

SEQ ID NO: 47577 - DNA, 20 bp, synthetic construct
  misc_feature 1..20: note = chemically synthesized
  source 1..20: mol_type = other DNA
gactgcagtgttagtggcag

SEQ ID NO: 47578 - DNA, 20 bp, synthetic construct
  misc_feature 1..20: note = chemically synthesized
  source 1..20: mol_type = other DNA
actgcagtgttagtggcaga

SEQ ID NO: 47579 - DNA, 20 bp, synthetic construct
  misc_feature 1..20: note = chemically synthesized
  source 1..20: mol_type = other DNA
gttagtggcagaaggacttt

SEQ ID NO: 47580 - DNA, 20 bp, synthetic construct
  misc_feature 1..20: note = chemically synthesized
  source 1..20: mol_type = other DNA
gaaggactttcagtcacctc

SEQ ID NO: 47581 - DNA, 20 bp, synthetic construct
  misc_feature 1..20: note = chemically synthesized
  source 1..20: mol_type = other DNA
aaggactttcagtcacctct

SEQ ID NO: 47582 - DNA, 20 bp, synthetic construct
  misc_feature 1..20: note = chemically synthesized
  source 1..20: mol_type = other DNA
ggactttcagtcacctctgg

SEQ ID NO: 47583 - DNA, 20 bp, synthetic construct
  misc_feature 1..20: note = chemically synthesized
  source 1..20: mol_type = other DNA
agcttcaccccacaaaaaca

SEQ ID NO: 47584 - DNA, 20 bp, synthetic construct
  misc_feature 1..20: note = chemically synthesized
  source 1..20: mol_type = other DNA
cttcaccccacaaaaacaca

SEQ ID NO: 47585 - DNA, 20 bp, synthetic construct
  misc_feature 1..20: note = chemically synthesized
  source 1..20: mol_type = other DNA
ccccacaaaaacacagagtg

SEQ ID NO: 47586 - DNA, 20 bp, synthetic construct
  misc_feature 1..20: note = chemically synthesized
  source 1..20: mol_type = other DNA
acaaaaacacagagtgcagc

SEQ ID NO: 47587 - DNA, 20 bp, synthetic construct
  misc_feature 1..20: note = chemically synthesized
  source 1..20: mol_type = other DNA
aaaacacagagtgcagccag

SEQ ID NO: 47588 - DNA, 20 bp, synthetic construct
  misc_feature 1..20: note = chemically synthesized
  source 1..20: mol_type = other DNA
gccagtggaaatgttcaact

SEQ ID NO: 47589 - DNA, 20 bp, synthetic construct
  misc_feature 1..20: note = chemically synthesized
  source 1..20: mol_type = other DNA
ggaaatgttcaactgagttc

SEQ ID NO: 47590 - DNA, 20 bp, synthetic construct
  misc_feature 1..20: note = chemically synthesized
  source 1..20: mol_type = other DNA
gaaatgttcaactgagttcg

SEQ ID NO: 47591 - DNA, 20 bp, synthetic construct
  misc_feature 1..20: note = chemically synthesized
  source 1..20: mol_type = other DNA
agttcgaggtgcctgcactg

SEQ ID NO: 47592 - DNA, 20 bp, synthetic construct
  misc_feature 1..20: note = chemically synthesized
  source 1..20: mol_type = other DNA
gttcgaggtgcctgcactgt

SEQ ID NO: 47593 - DNA, 20 bp, synthetic construct
  misc_feature 1..20: note = chemically synthesized
  source 1..20: mol_type = other DNA
ggtgcctgcactgtgggccc

SEQ ID NO: 47594 - DNA, 20 bp, synthetic construct
  misc_feature 1..20: note = chemically synthesized
  source 1..20: mol_type = other DNA
cctgcactgtgggcccaagc

SEQ ID NO: 47595 - DNA, 20 bp, synthetic construct
  misc_feature 1..20: note = chemically synthesized
  source 1..20: mol_type = other DNA
ctgcactgtgggcccaagcc

SEQ ID NO: 47596 - DNA, 20 bp, synthetic construct
  misc_feature 1..20: note = chemically synthesized
  source 1..20: mol_type = other DNA
gcactgtgggcccaagccag

SEQ ID NO: 47597 - DNA, 20 bp, synthetic construct
  misc_feature 1..20: note = chemically synthesized
  source 1..20: mol_type = other DNA
cccaagccaggagccttgcc

SEQ ID NO: 47598 - DNA, 20 bp, synthetic construct
  misc_feature 1..20: note = chemically synthesized
  source 1..20: mol_type = other DNA
gccaggagccttgcctggtg

SEQ ID NO: 47599 - DNA, 20 bp, synthetic construct
  misc_feature 1..20: note = chemically synthesized
  source 1..20: mol_type = other DNA
caggagccttgcctggtgaa

SEQ ID NO: 47600 - DNA, 20 bp, synthetic construct
  misc_feature 1..20: note = chemically synthesized
  source 1..20: mol_type = other DNA
gagccttgcctggtgaagag

SEQ ID NO: 47601 - DNA, 20 bp, synthetic construct
  misc_feature 1..20: note = chemically synthesized
  source 1..20: mol_type = other DNA
ccttgcctggtgaagagtag

SEQ ID NO: 47602 - DNA, 20 bp, synthetic construct
  misc_feature 1..20: note = chemically synthesized
  source 1..20: mol_type = other DNA
cttgcctggtgaagagtagc

SEQ ID NO: 47603 - DNA, 20 bp, synthetic construct
  misc_feature 1..20: note = chemically synthesized
  source 1..20: mol_type = other DNA
tggtgaagagtagcaggtga

SEQ ID NO: 47604 - DNA, 20 bp, synthetic construct
  misc_feature 1..20: note = chemically synthesized
  source 1..20: mol_type = other DNA
agtagcaggtgaaagctcac

SEQ ID NO: 47605 - DNA, 20 bp, synthetic construct
  misc_feature 1..20: note = chemically synthesized
  source 1..20: mol_type = other DNA
gcaggtgaaagctcacaaga

SEQ ID NO: 47606 - DNA, 20 bp, synthetic construct
  misc_feature 1..20: note = chemically synthesized
  source 1..20: mol_type = other DNA
aggtgaaagctcacaagaaa

SEQ ID NO: 47607 - DNA, 20 bp, synthetic construct
  misc_feature 1..20: note = chemically synthesized
  source 1..20: mol_type = other DNA
agctcacaagaaagagaaac

SEQ ID NO: 47608 - DNA, 20 bp, synthetic construct
  misc_feature 1..20: note = chemically synthesized
  source 1..20: mol_type = other DNA
attctttccctgctgtgtgc

SEQ ID NO: 47609 - DNA, 20 bp, synthetic construct
  misc_feature 1..20: note = chemically synthesized
  source 1..20: mol_type = other DNA
tctttccctgctgtgtgctg

SEQ ID NO: 47610 - DNA, 20 bp, synthetic construct
  misc_feature 1..20: note = chemically synthesized
  source 1..20: mol_type = other DNA
ctttccctgctgtgtgctgg

SEQ ID NO: 47611 - DNA, 20 bp, synthetic construct
  misc_feature 1..20: note = chemically synthesized
  source 1..20: mol_type = other DNA
ctgctgtgtgctggaggtgt

SEQ ID NO: 47612 - DNA, 20 bp, synthetic construct
  misc_feature 1..20: note = chemically synthesized
  source 1..20: mol_type = other DNA
tgctgtgtgctggaggtgtc

SEQ ID NO: 47613 - DNA, 20 bp, synthetic construct
  misc_feature 1..20: note = chemically synthesized
  source 1..20: mol_type = other DNA
gctgtgtgctggaggtgtca

SEQ ID NO: 47614 - DNA, 20 bp, synthetic construct
  misc_feature 1..20: note = chemically synthesized
  source 1..20: mol_type = other DNA
gtgtgctggaggtgtcaggg

SEQ ID NO: 47615 - DNA, 20 bp, synthetic construct
  misc_feature 1..20: note = chemically synthesized
  source 1..20: mol_type = other DNA
tgctggaggtgtcagggaag

SEQ ID NO: 47616 - DNA, 20 bp, synthetic construct
  misc_feature 1..20: note = chemically synthesized
  source 1..20: mol_type = other DNA
ggaggtgtcagggaagtggc

SEQ ID NO: 47617 - DNA, 20 bp, synthetic construct
  misc_feature 1..20: note = chemically synthesized
  source 1..20: mol_type = other DNA
gaggtgtcagggaagtggcc

SEQ ID NO: 47618 - DNA, 20 bp, synthetic construct
  misc_feature 1..20: note = chemically synthesized
  source 1..20: mol_type = other DNA
ggccaggtcccttctttctc

SEQ ID NO: 47619 - DNA, 20 bp, synthetic construct
  misc_feature 1..20: note = chemically synthesized
  source 1..20: mol_type = other DNA
gtcccttctttctcaagccc

SEQ ID NO: 47620 - DNA, 20 bp, synthetic construct
  misc_feature 1..20: note = chemically synthesized
  source 1..20: mol_type = other DNA
tcccttctttctcaagccca

SEQ ID NO: 47621 - DNA, 20 bp, synthetic construct
  misc_feature 1..20: note = chemically synthesized
  source 1..20: mol_type = other DNA
cccttctttctcaagcccaa

SEQ ID NO: 47622 - DNA, 20 bp, synthetic construct
  misc_feature 1..20: note = chemically synthesized
  source 1..20: mol_type = other DNA
ctcaagcccaagggcattaa

SEQ ID NO: 47623 - DNA, 20 bp, synthetic construct
  misc_feature 1..20: note = chemically synthesized
  source 1..20: mol_type = other DNA
aagcccaagggcattaacgg

SEQ ID NO: 47624 - DNA, 20 bp, synthetic construct
  misc_feature 1..20: note = chemically synthesized
  source 1..20: mol_type = other DNA
cattaacggtggtactgctg

SEQ ID NO: 47625 - DNA, 20 bp, synthetic construct
  misc_feature 1..20: note = chemically synthesized
  source 1..20: mol_type = other DNA
tggtactgctgcagctgaaa

SEQ ID NO: 47626 - DNA, 20 bp, synthetic construct
  misc_feature 1..20: note = chemically synthesized
  source 1..20: mol_type = other DNA
tactgctgcagctgaaatgg

SEQ ID NO: 47627 - DNA, 20 bp, synthetic construct
  misc_feature 1..20: note = chemically synthesized
  source 1..20: mol_type = other DNA
ctgctgcagctgaaatggca

SEQ ID NO: 47628 - DNA, 20 bp, synthetic construct
  misc_feature 1..20: note = chemically synthesized
  source 1..20: mol_type = other DNA
tgctgcagctgaaatggcag

SEQ ID NO: 47629 - DNA, 20 bp, synthetic construct
  misc_feature 1..20: note = chemically synthesized
  source 1..20: mol_type = other DNA
gctgcagctgaaatggcaga

SEQ ID NO: 47630 - DNA, 20 bp, synthetic construct
  misc_feature 1..20: note = chemically synthesized
  source 1..20: mol_type = other DNA
ctgcagctgaaatggcagag

SEQ ID NO: 47631 - DNA, 20 bp, synthetic construct
  misc_feature 1..20: note = chemically synthesized
  source 1..20: mol_type = other DNA
ctgaaatggcagaggggctg

SEQ ID NO: 47632 - DNA, 20 bp, synthetic construct
  misc_feature 1..20: note = chemically synthesized
  source 1..20: mol_type = other DNA
tgaaatggcagaggggctgt

SEQ ID NO: 47633 - DNA, 20 bp, synthetic construct
  misc_feature 1..20: note = chemically synthesized
  source 1..20: mol_type = other DNA
aggggctgtgggttgtctct

SEQ ID NO: 47634 - DNA, 20 bp, synthetic construct
  misc_feature 1..20: note = chemically synthesized
  source 1..20: mol_type = other DNA
tgtctcttggatttcctccc

SEQ ID NO: 47635 - DNA, 20 bp, synthetic construct
  misc_feature 1..20: note = chemically synthesized
  source 1..20: mol_type = other DNA
tctcttggatttcctcccca

SEQ ID NO: 47636 - DNA, 20 bp, synthetic construct
  misc_feature 1..20: note = chemically synthesized
  source 1..20: mol_type = other DNA
cttggatttcctccccagag

SEQ ID NO: 47637 - DNA, 20 bp, synthetic construct
  misc_feature 1..20: note = chemically synthesized
  source 1..20: mol_type = other DNA
atttcctccccagagaagca

SEQ ID NO: 47638 - DNA, 20 bp, synthetic construct
  misc_feature 1..20: note = chemically synthesized
  source 1..20: mol_type = other DNA
ttcctccccagagaagcaca

SEQ ID NO: 47639 - DNA, 20 bp, synthetic construct
  misc_feature 1..20: note = chemically synthesized
  source 1..20: mol_type = other DNA
ccaacactgactaaaatgtt

SEQ ID NO: 47640 - DNA, 20 bp, synthetic construct
  misc_feature 1..20: note = chemically synthesized
  source 1..20: mol_type = other DNA
caacactgactaaaatgttc

SEQ ID NO: 47641 - DNA, 20 bp, synthetic construct
  misc_feature 1..20: note = chemically synthesized
  source 1..20: mol_type = other DNA
cactgactaaaatgttcagg

SEQ ID NO: 47642 - DNA, 20 bp, synthetic construct
  misc_feature 1..20: note = chemically synthesized
  source 1..20: mol_type = other DNA
actgactaaaatgttcaggc

SEQ ID NO: 47643 - DNA, 20 bp, synthetic construct
  misc_feature 1..20: note = chemically synthesized
  source 1..20: mol_type = other DNA
ctgactaaaatgttcaggca

SEQ ID NO: 47644 - DNA, 20 bp, synthetic construct
  misc_feature 1..20: note = chemically synthesized
  source 1..20: mol_type = other DNA
ctaaaatgttcaggcagggc

SEQ ID NO: 47645 - DNA, 20 bp, synthetic construct
  misc_feature 1..20: note = chemically synthesized
  source 1..20: mol_type = other DNA
taaaatgttcaggcagggcc

SEQ ID NO: 47646 - DNA, 20 bp, synthetic construct
  misc_feature 1..20: note = chemically synthesized
  source 1..20: mol_type = other DNA
aaaatgttcaggcagggcca

SEQ ID NO: 47647 - DNA, 20 bp, synthetic construct
  misc_feature 1..20: note = chemically synthesized
  source 1..20: mol_type = other DNA
atgttcaggcagggccaggg

SEQ ID NO: 47648 - DNA, 20 bp, synthetic construct
  misc_feature 1..20: note = chemically synthesized
  source 1..20: mol_type = other DNA
cagggtggctgtgctctgcc

SEQ ID NO: 47649 - DNA, 20 bp, synthetic construct
  misc_feature 1..20: note = chemically synthesized
  source 1..20: mol_type = other DNA
gtggctgtgctctgcccagt

SEQ ID NO: 47650 - DNA, 20 bp, synthetic construct
  misc_feature 1..20: note = chemically synthesized
  source 1..20: mol_type = other DNA
tggctgtgctctgcccagtg

SEQ ID NO: 47651 - DNA, 20 bp, synthetic construct
  misc_feature 1..20: note = chemically synthesized
  source 1..20: mol_type = other DNA
gtgctctgcccagtgaggaa

SEQ ID NO: 47652 - DNA, 20 bp, synthetic construct
  misc_feature 1..20: note = chemically synthesized
  source 1..20: mol_type = other DNA
ctctgcccagtgaggaatag

SEQ ID NO: 47653 - DNA, 20 bp, synthetic construct
  misc_feature 1..20: note = chemically synthesized
  source 1..20: mol_type = other DNA
tctgcccagtgaggaatagt

SEQ ID NO: 47654 - DNA, 20 bp, synthetic construct
  misc_feature 1..20: note = chemically synthesized
  source 1..20: mol_type = other DNA
ctgcccagtgaggaatagta

SEQ ID NO: 47655 - DNA, 20 bp, synthetic construct
  misc_feature 1..20: note = chemically synthesized
  source 1..20: mol_type = other DNA
tgcccagtgaggaatagtag

SEQ ID NO: 47656 - DNA, 20 bp, synthetic construct
  misc_feature 1..20: note = chemically synthesized
  source 1..20: mol_type = other DNA
ccagtgaggaatagtagggg

SEQ ID NO: 47657 - DNA, 20 bp, synthetic construct
  misc_feature 1..20: note = chemically synthesized
  source 1..20: mol_type = other DNA
cagtgaggaatagtaggggc

SEQ ID NO: 47658 - DNA, 20 bp, synthetic construct
  misc_feature 1..20: note = chemically synthesized
  source 1..20: mol_type = other DNA
agtgaggaatagtaggggca

SEQ ID NO: 47659 - DNA, 20 bp, synthetic construct
  misc_feature 1..20: note = chemically synthesized
  source 1..20: mol_type = other DNA
ggaatagtaggggcagggac

SEQ ID NO: 47660 - DNA, 20 bp, synthetic construct
  misc_feature 1..20: note = chemically synthesized
  source 1..20: mol_type = other DNA
agtaggggcagggaccagtg

SEQ ID NO: 47661 - DNA, 20 bp, synthetic construct
  misc_feature 1..20: note = chemically synthesized
  source 1..20: mol_type = other DNA
gcagggaccagtgcagaaaa

SEQ ID NO: 47662 - DNA, 20 bp, synthetic construct
  misc_feature 1..20: note = chemically synthesized
  source 1..20: mol_type = other DNA
gaccagtgcagaaaacagtg

SEQ ID NO: 47663 - DNA, 20 bp, synthetic construct
  misc_feature 1..20: note = chemically synthesized
  source 1..20: mol_type = other DNA
cagtgtggccacttttccat

SEQ ID NO: 47664 - DNA, 20 bp, synthetic construct
  misc_feature 1..20: note = chemically synthesized
  source 1..20: mol_type = other DNA
agtgtggccacttttccata

SEQ ID NO: 47665 - DNA, 20 bp, synthetic construct
  misc_feature 1..20: note = chemically synthesized
  source 1..20: mol_type = other DNA
gtggccacttttccataagg

SEQ ID NO: 47666 - DNA, 20 bp, synthetic construct
  misc_feature 1..20: note = chemically synthesized
  source 1..20: mol_type = other DNA
ataaggcagctacactgtgc

SEQ ID NO: 47667 - DNA, 20 bp, synthetic construct
  misc_feature 1..20: note = chemically synthesized
  source 1..20: mol_type = other DNA
aaggcagctacactgtgctg

SEQ ID NO: 47668 - DNA, 20 bp, synthetic construct
  misc_feature 1..20: note = chemically synthesized
  source 1..20: mol_type = other DNA
aggcagctacactgtgctgg

SEQ ID NO: 47669 - DNA, 20 bp, synthetic construct
  misc_feature 1..20: note = chemically synthesized
  source 1..20: mol_type = other DNA
acactgtgctggaggtccgt

SEQ ID NO: 47670 - DNA, 20 bp, synthetic construct
  misc_feature 1..20: note = chemically synthesized
  source 1..20: mol_type = other DNA
actgtgctggaggtccgtga

SEQ ID NO: 47671 - DNA, 20 bp, synthetic construct
  misc_feature 1..20: note = chemically synthesized
  source 1..20: mol_type = other DNA
ggaggtccgtgagagtcctg

SEQ ID NO: 47672 - DNA, 20 bp, synthetic construct
  misc_feature 1..20: note = chemically synthesized
  source 1..20: mol_type = other DNA
gaagctcctcgctccctcct

SEQ ID NO: 47673 - DNA, 20 bp, synthetic construct
  misc_feature 1..20: note = chemically synthesized
  source 1..20: mol_type = other DNA
tgagcccatactttaatctc

SEQ ID NO: 47674 - DNA, 20 bp, synthetic construct
  misc_feature 1..20: note = chemically synthesized
  source 1..20: mol_type = other DNA
agcccatactttaatctcaa

SEQ ID NO: 47675 - DNA, 20 bp, synthetic construct
  misc_feature 1..20: note = chemically synthesized
  source 1..20: mol_type = other DNA
tactttaatctcaagagttt

SEQ ID NO: 47676 - DNA, 20 bp, synthetic construct
  misc_feature 1..20: note = chemically synthesized
  source 1..20: mol_type = other DNA
tctcaagagtttgagataaa

SEQ ID NO: 47677 - DNA, 20 bp, synthetic construct
  misc_feature 1..20: note = chemically synthesized
  source 1..20: mol_type = other DNA
caagagtttgagataaacag

SEQ ID NO: 47678 - DNA, 20 bp, synthetic construct
  misc_feature 1..20: note = chemically synthesized
  source 1..20: mol_type = other DNA
agtttgagataaacagtggt

SEQ ID NO: 47679 - DNA, 20 bp, synthetic construct
  misc_feature 1..20: note = chemically synthesized
  source 1..20: mol_type = other DNA
gtttgagataaacagtggta

SEQ ID NO: 47680 - DNA, 20 bp, synthetic construct
  misc_feature 1..20: note = chemically synthesized
  source 1..20: mol_type = other DNA
tgagataaacagtggtaagg

SEQ ID NO: 47681 - DNA, 20 bp, synthetic construct
  misc_feature 1..20: note = chemically synthesized
  source 1..20: mol_type = other DNA
ataaacagtggtaaggaaga

SEQ ID NO: 47682 - DNA, 20 bp, synthetic construct
  misc_feature 1..20: note = chemically synthesized
  source 1..20: mol_type = other DNA
tggtaaggaagaaagtacaa

SEQ ID NO: 47683 - DNA, 20 bp, synthetic construct
  misc_feature 1..20: note = chemically synthesized
  source 1..20: mol_type = other DNA
ggtaaggaagaaagtacaac

SEQ ID NO: 47684 - DNA, 20 bp, synthetic construct
  misc_feature 1..20: note = chemically synthesized
  source 1..20: mol_type = other DNA
ggaagaaagtacaacgggta

SEQ ID NO: 47685 - DNA, 20 bp, synthetic construct
  misc_feature 1..20: note = chemically synthesized
  source 1..20: mol_type = other DNA
cgggtacggctaatgaaacc

SEQ ID NO: 47686 - DNA, 20 bp, synthetic construct
  misc_feature 1..20: note = chemically synthesized
  source 1..20: mol_type = other DNA
gggtacggctaatgaaaccc

SEQ ID NO: 47687 - DNA, 20 bp, synthetic construct
  misc_feature 1..20: note = chemically synthesized
  source 1..20: mol_type = other DNA
tacggctaatgaaacccagg

SEQ ID NO: 47688 - DNA, 20 bp, synthetic construct
  misc_feature 1..20: note = chemically synthesized
  source 1..20: mol_type = other DNA
ctaatgaaacccaggaagat

SEQ ID NO: 47689 - DNA, 20 bp, synthetic construct
  misc_feature 1..20: note = chemically synthesized
  source 1..20: mol_type = other DNA
caggaagataagtcaatgcg

SEQ ID NO: 47690 - DNA, 20 bp, synthetic construct
  misc_feature 1..20: note = chemically synthesized
  source 1..20: mol_type = other DNA
gaagataagtcaatgcgtag

SEQ ID NO: 47691 - DNA, 20 bp, synthetic construct
  misc_feature 1..20: note = chemically synthesized
  source 1..20: mol_type = other DNA
gtagaagtaattccaaccta

SEQ ID NO: 47692 - DNA, 20 bp, synthetic construct
  misc_feature 1..20: note = chemically synthesized
  source 1..20: mol_type = other DNA
ctttttaaaaatcatattta

SEQ ID NO: 47693 - DNA, 20 bp, synthetic construct
  misc_feature 1..20: note = chemically synthesized
  source 1..20: mol_type = other DNA
ttttaaaaatcatatttata

SEQ ID NO: 47694 - DNA, 20 bp, synthetic construct
  misc_feature 1..20: note = chemically synthesized
  source 1..20: mol_type = other DNA
tttaaaaatcatatttatag

SEQ ID NO: 47695 - DNA, 20 bp, synthetic construct
  misc_feature 1..20: note = chemically synthesized
  source 1..20: mol_type = other DNA
atcatatttatagaggtttg

SEQ ID NO: 47696 - DNA, 20 bp, synthetic construct
  misc_feature 1..20: note = chemically synthesized
  source 1..20: mol_type = other DNA
agaggtttgcagtgatacta

SEQ ID NO: 47697 - DNA, 20 bp, synthetic construct
  misc_feature 1..20: note = chemically synthesized
  source 1..20: mol_type = other DNA
caatattgcaaatcattatt

SEQ ID NO: 47698 - DNA, 20 bp, synthetic construct
  misc_feature 1..20: note = chemically synthesized
  source 1..20: mol_type = other DNA
caaatcattattaagaatac

SEQ ID NO: 47699 - DNA, 20 bp, synthetic construct
  misc_feature 1..20: note = chemically synthesized
  source 1..20: mol_type = other DNA
atcattattaagaatacaag

SEQ ID NO: 47700 - DNA, 20 bp, synthetic construct
  misc_feature 1..20: note = chemically synthesized
  source 1..20: mol_type = other DNA
tttctttaacacctgtgata

SEQ ID NO: 47701 - DNA, 20 bp, synthetic construct
  misc_feature 1..20: note = chemically synthesized
  source 1..20: mol_type = other DNA
ttctttaacacctgtgatac

SEQ ID NO: 47702 - DNA, 20 bp, synthetic construct
  misc_feature 1..20: note = chemically synthesized
  source 1..20: mol_type = other DNA
ttgatatgaattctacgtaa

SEQ ID NO: 47703 - DNA, 20 bp, synthetic construct
  misc_feature 1..20: note = chemically synthesized
  source 1..20: mol_type = other DNA
ttgcttcttgccaccaccca

SEQ ID NO: 47704 - DNA, 20 bp, synthetic construct
  misc_feature 1..20: note = chemically synthesized
  source 1..20: mol_type = other DNA
cttcttgccaccacccaaag

SEQ ID NO: 47705 - DNA, 20 bp, synthetic construct
  misc_feature 1..20: note = chemically synthesized
  source 1..20: mol_type = other DNA
ttcttgccaccacccaaaga

SEQ ID NO: 47706 - DNA, 20 bp, synthetic construct
  misc_feature 1..20: note = chemically synthesized
  source 1..20: mol_type = other DNA
accacccaaagaaggttgta

SEQ ID NO: 47707 - DNA, 20 bp, synthetic construct
  misc_feature 1..20: note = chemically synthesized
  source 1..20: mol_type = other DNA
aaagaaggttgtatagcact

SEQ ID NO: 47708 - DNA, 20 bp, synthetic construct
  misc_feature 1..20: note = chemically synthesized
  source 1..20: mol_type = other DNA
aactgcaaccgtgtatctct

SEQ ID NO: 47709 - DNA, 20 bp, synthetic construct
  misc_feature 1..20: note = chemically synthesized
  source 1..20: mol_type = other DNA
actgcaaccgtgtatctctt

SEQ ID NO: 47710 - DNA, 20 bp, synthetic construct
  misc_feature 1..20: note = chemically synthesized
  source 1..20: mol_type = other DNA
ttgccctcttccctccctat

SEQ ID NO: 47711 - DNA, 20 bp, synthetic construct
  misc_feature 1..20: note = chemically synthesized
  source 1..20: mol_type = other DNA
cctccctatcagcatgtatc

SEQ ID NO: 47712 - DNA, 20 bp, synthetic construct
  misc_feature 1..20: note = chemically synthesized
  source 1..20: mol_type = other DNA
ccctatcagcatgtatctag

SEQ ID NO: 47713 - DNA, 20 bp, synthetic construct
  misc_feature 1..20: note = chemically synthesized
  source 1..20: mol_type = other DNA
gtatctagcagcattctgaa

SEQ ID NO: 47714 - DNA, 20 bp, synthetic construct
  misc_feature 1..20: note = chemically synthesized
  source 1..20: mol_type = other DNA
attctgaaaagttaactgca

SEQ ID NO: 47715 - DNA, 20 bp, synthetic construct
  misc_feature 1..20: note = chemically synthesized
  source 1..20: mol_type = other DNA
tgaaaagttaactgcacagt

SEQ ID NO: 47716 - DNA, 20 bp, synthetic construct
  misc_feature 1..20: note = chemically synthesized
  source 1..20: mol_type = other DNA
actgcacagtgagcgactgc

SEQ ID NO: 47717 - DNA, 20 bp, synthetic construct
  misc_feature 1..20: note = chemically synthesized
  source 1..20: mol_type = other DNA
ctgcacagtgagcgactgct

SEQ ID NO: 47718 - DNA, 20 bp, synthetic construct
  misc_feature 1..20: note = chemically synthesized
  source 1..20: mol_type = other DNA
gagcgactgctgggcatctt

SEQ ID NO: 47719 - DNA, 20 bp, synthetic construct
  misc_feature 1..20: note = chemically synthesized
  source 1..20: mol_type = other DNA
agcgactgctgggcatctta

SEQ ID NO: 47720 - DNA, 20 bp, synthetic construct
  misc_feature 1..20: note = chemically synthesized
  source 1..20: mol_type = other DNA
gcgactgctgggcatcttaa

SEQ ID NO: 47721 - DNA, 20 bp, synthetic construct
  misc_feature 1..20: note = chemically synthesized
  source 1..20: mol_type = other DNA
cgactgctgggcatcttaag

SEQ ID NO: 47722 - DNA, 20 bp, synthetic construct
  misc_feature 1..20: note = chemically synthesized
  source 1..20: mol_type = other DNA
aaggggcattcttttctacc

SEQ ID NO: 47723 - DNA, 20 bp, synthetic construct
  misc_feature 1..20: note = chemically synthesized
  source 1..20: mol_type = other DNA
aggggcattcttttctacct

SEQ ID NO: 47724 - DNA, 20 bp, synthetic construct
  misc_feature 1..20: note = chemically synthesized
  source 1..20: mol_type = other DNA
ccccctcctccactcatgtc

SEQ ID NO: 47725 - DNA, 20 bp, synthetic construct
  misc_feature 1..20: note = chemically synthesized
  source 1..20: mol_type = other DNA
ctccactcatgtctagcatg

SEQ ID NO: 47726 - DNA, 20 bp, synthetic construct
  misc_feature 1..20: note = chemically synthesized
  source 1..20: mol_type = other DNA
tccactcatgtctagcatgc

SEQ ID NO: 47727 - DNA, 20 bp, synthetic construct
  misc_feature 1..20: note = chemically synthesized
  source 1..20: mol_type = other DNA
catgtctagcatgcaggact

SEQ ID NO: 47728 - DNA, 20 bp, synthetic construct
  misc_feature 1..20: note = chemically synthesized
  source 1..20: mol_type = other DNA
atgtctagcatgcaggactt

SEQ ID NO: 47729 - DNA, 20 bp, synthetic construct
  misc_feature 1..20: note = chemically synthesized
  source 1..20: mol_type = other DNA
tgcaggacttgggtaatctc

SEQ ID NO: 47730 - DNA, 20 bp, synthetic construct
  misc_feature 1..20: note = chemically synthesized
  source 1..20: mol_type = other DNA
gcaggacttgggtaatctct

SEQ ID NO: 47731 - DNA, 20 bp, synthetic construct
  misc_feature 1..20: note = chemically synthesized
  source 1..20: mol_type = other DNA
caggacttgggtaatctctg

SEQ ID NO: 47732 - DNA, 20 bp, synthetic construct
  misc_feature 1..20: note = chemically synthesized
  source 1..20: mol_type = other DNA
ttgggtaatctctggggttt

SEQ ID NO: 47733 - DNA, 20 bp, synthetic construct
  misc_feature 1..20: note = chemically synthesized
  source 1..20: mol_type = other DNA
ctctggggtttcagattctc

SEQ ID NO: 47734 - DNA, 20 bp, synthetic construct
  misc_feature 1..20: note = chemically synthesized
  source 1..20: mol_type = other DNA
tctccagacctccattctct

SEQ ID NO: 47735 - DNA, 20 bp, synthetic construct
  misc_feature 1..20: note = chemically synthesized
  source 1..20: mol_type = other DNA
ctccagacctccattctctc

SEQ ID NO: 47736 - DNA, 20 bp, synthetic construct
  misc_feature 1..20: note = chemically synthesized
  source 1..20: mol_type = other DNA
tccagacctccattctctca

SEQ ID NO: 47737 - DNA, 20 bp, synthetic construct
  misc_feature 1..20: note = chemically synthesized
  source 1..20: mol_type = other DNA
ccagacctccattctctcag

SEQ ID NO: 47738 - DNA, 20 bp, synthetic construct
  misc_feature 1..20: note = chemically synthesized
  source 1..20: mol_type = other DNA
ttccacctcctgctcatatc

SEQ ID NO: 47739 - DNA, 20 bp, synthetic construct
  misc_feature 1..20: note = chemically synthesized
  source 1..20: mol_type = other DNA
ctcatatctagctatctgcc

SEQ ID NO: 47740 - DNA, 20 bp, synthetic construct
  misc_feature 1..20: note = chemically synthesized
  source 1..20: mol_type = other DNA
ctaaccataaaatcttaaat

SEQ ID NO: 47741 - DNA, 20 bp, synthetic construct
  misc_feature 1..20: note = chemically synthesized
  source 1..20: mol_type = other DNA
catgtcatgataaaaaaaat

SEQ ID NO: 47742 - DNA, 20 bp, synthetic construct
  misc_feature 1..20: note = chemically synthesized
  source 1..20: mol_type = other DNA
taaaaaaaataagacaccat

SEQ ID NO: 47743 - DNA, 20 bp, synthetic construct
  misc_feature 1..20: note = chemically synthesized
  source 1..20: mol_type = other DNA
aaaaaataagacaccatcag

SEQ ID NO: 47744 - DNA, 20 bp, synthetic construct
  misc_feature 1..20: note = chemically synthesized
  source 1..20: mol_type = other DNA
tcagtggcaactgtgttgcc

SEQ ID NO: 47745 - DNA, 20 bp, synthetic construct
  misc_feature 1..20: note = chemically synthesized
  source 1..20: mol_type = other DNA
ttgatctgctaatccctgtg

SEQ ID NO: 47746 - DNA, 20 bp, synthetic construct
  misc_feature 1..20: note = chemically synthesized
  source 1..20: mol_type = other DNA
ccctgtgtagaaatgaacct

SEQ ID NO: 47747 - DNA, 20 bp, synthetic construct
  misc_feature 1..20: note = chemically synthesized
  source 1..20: mol_type = other DNA
ctgtgtagaaatgaaccttg

SEQ ID NO: 47748 - DNA, 20 bp, synthetic construct
  misc_feature 1..20: note = chemically synthesized
  source 1..20: mol_type = other DNA
tgtgtagaaatgaaccttgg

SEQ ID NO: 47749 - DNA, 20 bp, synthetic construct
  misc_feature 1..20: note = chemically synthesized
  source 1..20: mol_type = other DNA
atttcttacaatatgtgcat

SEQ ID NO: 47750 - DNA, 20 bp, synthetic construct
  misc_feature 1..20: note = chemically synthesized
  source 1..20: mol_type = other DNA
ttgtaacactgtcactttga

SEQ ID NO: 47751 - DNA, 20 bp, synthetic construct
  misc_feature 1..20: note = chemically synthesized
  source 1..20: mol_type = other DNA
ctgtcactttgacagttgat

SEQ ID NO: 47752 - DNA, 20 bp, synthetic construct
  misc_feature 1..20: note = chemically synthesized
  source 1..20: mol_type = other DNA
gttgataagcatcttctgaa

SEQ ID NO: 47753 - DNA, 20 bp, synthetic construct
  misc_feature 1..20: note = chemically synthesized
  source 1..20: mol_type = other DNA
cttctgaatggtccctcctt

SEQ ID NO: 47754 - DNA, 20 bp, synthetic construct
  misc_feature 1..20: note = chemically synthesized
  source 1..20: mol_type = other DNA
tcctttagttacaaaaatgt

SEQ ID NO: 47755 - DNA, 20 bp, synthetic construct
  misc_feature 1..20: note = chemically synthesized
  source 1..20: mol_type = other DNA
gttacaaaaatgttggtgca

SEQ ID NO: 47756 - DNA, 20 bp, synthetic construct
  misc_feature 1..20: note = chemically synthesized
  source 1..20: mol_type = other DNA
tgttggtgcatggatgatgt

SEQ ID NO: 47757 - DNA, 20 bp, synthetic construct
  misc_feature 1..20: note = chemically synthesized
  source 1..20: mol_type = other DNA
gttggtgcatggatgatgtt

SEQ ID NO: 47758 - DNA, 20 bp, synthetic construct
  misc_feature 1..20: note = chemically synthesized
  source 1..20: mol_type = other DNA
tgatgttgggaataaataaa

SEQ ID NO: 47759 - DNA, 20 bp, synthetic construct
  misc_feature 1..20: note = chemically synthesized
  source 1..20: mol_type = other DNA
actaaattatgttctcatct

SEQ ID NO: 47760 - DNA, 20 bp, synthetic construct
  misc_feature 1..20: note = chemically synthesized
  source 1..20: mol_type = other DNA
ctaaattatgttctcatctt

SEQ ID NO: 47761 - DNA, 20 bp, synthetic construct
  misc_feature 1..20: note = chemically synthesized
  source 1..20: mol_type = other DNA
tctcatcttgggcaaaaatt

SEQ ID NO: 47762 - DNA, 20 bp, synthetic construct
  misc_feature 1..20: note = chemically synthesized
  source 1..20: mol_type = other DNA
aaaattaagcaaaaaaaaaa

SEQ ID NO: 47763 - DNA, 20 bp, synthetic construct
  misc_feature 1..20: note = chemically synthesized
  source 1..20: mol_type = other DNA
aattaagcaaaaaaaaaatg

SEQ ID NO: 47764 - DNA, 20 bp, synthetic construct
  misc_feature 1..20: note = chemically synthesized
  source 1..20: mol_type = other DNA
attaagcaaaaaaaaaatgg

SEQ ID NO: 47765 - DNA, 20 bp, synthetic construct
  misc_feature 1..20: note = chemically synthesized
  source 1..20: mol_type = other DNA
aaaaaaaaatggaggatatg

SEQ ID NO: 47766 - DNA, 20 bp, synthetic construct
  misc_feature 1..20: note = chemically synthesized
  source 1..20: mol_type = other DNA
ggatatgaagctcctccaca

SEQ ID NO: 47767 - DNA, 20 bp, synthetic construct
  misc_feature 1..20: note = chemically synthesized
  source 1..20: mol_type = other DNA
tatgaagctcctccacaaag

SEQ ID NO: 47768 - DNA, 20 bp, synthetic construct
  misc_feature 1..20: note = chemically synthesized
  source 1..20: mol_type = other DNA
atgaagctcctccacaaaga

SEQ ID NO: 47769 - DNA, 20 bp, synthetic construct
  misc_feature 1..20: note = chemically synthesized
  source 1..20: mol_type = other DNA
aaagaaggccatttttgtac

SEQ ID NO: 47770 - DNA, 20 bp, synthetic construct
  misc_feature 1..20: note = chemically synthesized
  source 1..20: mol_type = other DNA
aagaaggccatttttgtact

SEQ ID NO: 47771 - DNA, 20 bp, synthetic construct
  misc_feature 1..20: note = chemically synthesized
  source 1..20: mol_type = other DNA
tttttgtactaggcttacta

SEQ ID NO: 47772 - DNA, 20 bp, synthetic construct
  misc_feature 1..20: note = chemically synthesized
  source 1..20: mol_type = other DNA
ctacagtgacacaccactat

SEQ ID NO: 47773 - DNA, 20 bp, synthetic construct
  misc_feature 1..20: note = chemically synthesized
  source 1..20: mol_type = other DNA
agtgacacaccactattagt

SEQ ID NO: 47774 - DNA, 20 bp, synthetic construct
  misc_feature 1..20: note = chemically synthesized
  source 1..20: mol_type = other DNA
gtgacacaccactattagtt

SEQ ID NO: 47775 - DNA, 20 bp, synthetic construct
  misc_feature 1..20: note = chemically synthesized
  source 1..20: mol_type = other DNA
tgacacaccactattagttg

SEQ ID NO: 47776 - DNA, 20 bp, synthetic construct
  misc_feature 1..20: note = chemically synthesized
  source 1..20: mol_type = other DNA
acacaccactattagttggg

SEQ ID NO: 47777 - DNA, 20 bp, synthetic construct
  misc_feature 1..20: note = chemically synthesized
  source 1..20: mol_type = other DNA
actattagttggggagaatt

SEQ ID NO: 47778 - DNA, 20 bp, synthetic construct
  misc_feature 1..20: note = chemically synthesized
  source 1..20: mol_type = other DNA
ggggagaattcagtttttcc

SEQ ID NO: 47779 - DNA, 20 bp, synthetic construct
  misc_feature 1..20: note = chemically synthesized
  source 1..20: mol_type = other DNA
gggagaattcagtttttcca

SEQ ID NO: 47780 - DNA, 20 bp, synthetic construct
  misc_feature 1..20: note = chemically synthesized
  source 1..20: mol_type = other DNA
cagtttttccaaggtgttga

SEQ ID NO: 47781 - DNA, 20 bp, synthetic construct
  misc_feature 1..20: note = chemically synthesized
  source 1..20: mol_type = other DNA
agtttttccaaggtgttgat

SEQ ID NO: 47782 - DNA, 20 bp, synthetic construct
  misc_feature 1..20: note = chemically synthesized
  source 1..20: mol_type = other DNA
ccaaggtgttgataggcatc

SEQ ID NO: 47783 - DNA, 20 bp, synthetic construct
  misc_feature 1..20: note = chemically synthesized
  source 1..20: mol_type = other DNA
gttgataggcatccagattt

SEQ ID NO: 47784 - DNA, 20 bp, synthetic construct
  misc_feature 1..20: note = chemically synthesized
  source 1..20: mol_type = other DNA
tgataggcatccagatttca

SEQ ID NO: 47785 - DNA, 20 bp, synthetic construct
  misc_feature 1..20: note = chemically synthesized
  source 1..20: mol_type = other DNA
gataggcatccagatttcag

SEQ ID NO: 47786 - DNA, 20 bp, synthetic construct
  misc_feature 1..20: note = chemically synthesized
  source 1..20: mol_type = other DNA
tttcagaggaaattgtaaaa

SEQ ID NO: 47787 - DNA, 20 bp, synthetic construct
  misc_feature 1..20: note = chemically synthesized
  source 1..20: mol_type = other DNA
cagaggaaattgtaaaaaag

SEQ ID NO: 47788 - DNA, 20 bp, synthetic construct
  misc_feature 1..20: note = chemically synthesized
  source 1..20: mol_type = other DNA
aattgtaaaaaagcagaacc

SEQ ID NO: 47789 - DNA, 20 bp, synthetic construct
  misc_feature 1..20: note = chemically synthesized
  source 1..20: mol_type = other DNA
attgtaaaaaagcagaacct

SEQ ID NO: 47790 - DNA, 20 bp, synthetic construct
  misc_feature 1..20: note = chemically synthesized
  source 1..20: mol_type = other DNA
actgcccacgatttttcttt

SEQ ID NO: 47791 - DNA, 20 bp, synthetic construct
  misc_feature 1..20: note = chemically synthesized
  source 1..20: mol_type = other DNA
ttttctttgagatcaaatct

SEQ ID NO: 47792 - DNA, 20 bp, synthetic construct
  misc_feature 1..20: note = chemically synthesized
  source 1..20: mol_type = other DNA
tttctttgagatcaaatctg

SEQ ID NO: 47793 - DNA, 20 bp, synthetic construct
  misc_feature 1..20: note = chemically synthesized
  source 1..20: mol_type = other DNA
gaggcaacaaatctgttcaa

SEQ ID NO: 47794 - DNA, 20 bp, synthetic construct
  misc_feature 1..20: note = chemically synthesized
  source 1..20: mol_type = other DNA
ttcaaaagctgctttctgcc

SEQ ID NO: 47795 - DNA, 20 bp, synthetic construct
  misc_feature 1..20: note = chemically synthesized
  source 1..20: mol_type = other DNA
agctgctttctgcctggttg

SEQ ID NO: 47796 - DNA, 20 bp, synthetic construct
  misc_feature 1..20: note = chemically synthesized
  source 1..20: mol_type = other DNA
ctttctgcctggttgtggca

SEQ ID NO: 47797 - DNA, 20 bp, synthetic construct
  misc_feature 1..20: note = chemically synthesized
  source 1..20: mol_type = other DNA
tttctgcctggttgtggcaa

SEQ ID NO: 47798 - DNA, 20 bp, synthetic construct
  misc_feature 1..20: note = chemically synthesized
  source 1..20: mol_type = other DNA
ttctgcctggttgtggcaaa

SEQ ID NO: 47799 - DNA, 20 bp, synthetic construct
  misc_feature 1..20: note = chemically synthesized
  source 1..20: mol_type = other DNA
tgcctggttgtggcaaaggg

SEQ ID NO: 47800 - DNA, 20 bp, synthetic construct
  misc_feature 1..20: note = chemically synthesized
  source 1..20: mol_type = other DNA
ggttgtggcaaagggtggcc

SEQ ID NO: 47801 - DNA, 20 bp, synthetic construct
  misc_feature 1..20: note = chemically synthesized
  source 1..20: mol_type = other DNA
tgtggcaaagggtggccaag

SEQ ID NO: 47802 - DNA, 20 bp, synthetic construct
  misc_feature 1..20: note = chemically synthesized
  source 1..20: mol_type = other DNA
gtggcaaagggtggccaagt

SEQ ID NO: 47803 - DNA, 20 bp, synthetic construct
  misc_feature 1..20: note = chemically synthesized
  source 1..20: mol_type = other DNA
tggcaaagggtggccaagtg

SEQ ID NO: 47804 - DNA, 20 bp, synthetic construct
  misc_feature 1..20: note = chemically synthesized
  source 1..20: mol_type = other DNA
aagggtggccaagtggggct

SEQ ID NO: 47805 - DNA, 20 bp, synthetic construct
  misc_feature 1..20: note = chemically synthesized
  source 1..20: mol_type = other DNA
ctcagctgtgttcccattgc

SEQ ID NO: 47806 - DNA, 20 bp, synthetic construct
  misc_feature 1..20: note = chemically synthesized
  source 1..20: mol_type = other DNA
tcagctgtgttcccattgca

SEQ ID NO: 47807 - DNA, 20 bp, synthetic construct
  misc_feature 1..20: note = chemically synthesized
  source 1..20: mol_type = other DNA
gttcccattgcaaggctact

SEQ ID NO: 47808 - DNA, 20 bp, synthetic construct
  misc_feature 1..20: note = chemically synthesized
  source 1..20: mol_type = other DNA
tactgagcatcccctgtcct

SEQ ID NO: 47809 - DNA, 20 bp, synthetic construct
  misc_feature 1..20: note = chemically synthesized
  source 1..20: mol_type = other DNA
actgagcatcccctgtcctg

SEQ ID NO: 47810 - DNA, 20 bp, synthetic construct
  misc_feature 1..20: note = chemically synthesized
  source 1..20: mol_type = other DNA
tcccctgtcctgaggctcct

SEQ ID NO: 47811 - DNA, 20 bp, synthetic construct
  misc_feature 1..20: note = chemically synthesized
  source 1..20: mol_type = other DNA
cccctgtcctgaggctcctt

SEQ ID NO: 47812 - DNA, 20 bp, synthetic construct
  misc_feature 1..20: note = chemically synthesized
  source 1..20: mol_type = other DNA
ctgaggctccttaggacacc

SEQ ID NO: 47813 - DNA, 20 bp, synthetic construct
  misc_feature 1..20: note = chemically synthesized
  source 1..20: mol_type = other DNA
gctccttaggacacctggct

SEQ ID NO: 47814 - DNA, 20 bp, synthetic construct
  misc_feature 1..20: note = chemically synthesized
  source 1..20: mol_type = other DNA
taggacacctggctgagctt

SEQ ID NO: 47815 - DNA, 20 bp, synthetic construct
  misc_feature 1..20: note = chemically synthesized
  source 1..20: mol_type = other DNA
gacacctggctgagcttcag

SEQ ID NO: 47816 - DNA, 20 bp, synthetic construct
  misc_feature 1..20: note = chemically synthesized
  source 1..20: mol_type = other DNA
agcttcagcagccctcttcc

SEQ ID NO: 47817 - DNA, 20 bp, synthetic construct
  misc_feature 1..20: note = chemically synthesized
  source 1..20: mol_type = other DNA
cagcagccctcttccaagcc

SEQ ID NO: 47818 - DNA, 20 bp, synthetic construct
  misc_feature 1..20: note = chemically synthesized
  source 1..20: mol_type = other DNA
gcagccctcttccaagcctg

SEQ ID NO: 47819 - DNA, 20 bp, synthetic construct
  misc_feature 1..20: note = chemically synthesized
  source 1..20: mol_type = other DNA
tcttccaagcctggagatgc

SEQ ID NO: 47820 - DNA, 20 bp, synthetic construct
  misc_feature 1..20: note = chemically synthesized
  source 1..20: mol_type = other DNA
ggagatgccagctccatctc

SEQ ID NO: 47821 - DNA, 20 bp, synthetic construct
  misc_feature 1..20: note = chemically synthesized
  source 1..20: mol_type = other DNA
tccatctctggcacaaaatg

SEQ ID NO: 47822 - DNA, 20 bp, synthetic construct
  misc_feature 1..20: note = chemically synthesized
  source 1..20: mol_type = other DNA
acaaaatgtagtgattttca

SEQ ID NO: 47823 - DNA, 20 bp, synthetic construct
  misc_feature 1..20: note = chemically synthesized
  source 1..20: mol_type = other DNA
caaaatgtagtgattttcac

SEQ ID NO: 47824 - DNA, 20 bp, synthetic construct
  misc_feature 1..20: note = chemically synthesized
  source 1..20: mol_type = other DNA
aaaatgtagtgattttcaca

SEQ ID NO: 47825 - DNA, 20 bp, synthetic construct
  misc_feature 1..20: note = chemically synthesized
  source 1..20: mol_type = other DNA
tgtagtgattttcacagggt

SEQ ID NO: 47826 - DNA, 20 bp, synthetic construct
  misc_feature 1..20: note = chemically synthesized
  source 1..20: mol_type = other DNA
tagtgattttcacagggtga

SEQ ID NO: 47827 - DNA, 20 bp, synthetic construct
  misc_feature 1..20: note = chemically synthesized
  source 1..20: mol_type = other DNA
agtgattttcacagggtgag

SEQ ID NO: 47828 - DNA, 20 bp, synthetic construct
  misc_feature 1..20: note = chemically synthesized
  source 1..20: mol_type = other DNA
ttcacagggtgagaggccaa

SEQ ID NO: 47829 - DNA, 20 bp, synthetic construct
  misc_feature 1..20: note = chemically synthesized
  source 1..20: mol_type = other DNA
cacagggtgagaggccaaaa

SEQ ID NO: 47830 - DNA, 20 bp, synthetic construct
  misc_feature 1..20: note = chemically synthesized
  source 1..20: mol_type = other DNA
acagggtgagaggccaaaag

SEQ ID NO: 47831 - DNA, 20 bp, synthetic construct
  misc_feature 1..20: note = chemically synthesized
  source 1..20: mol_type = other DNA
caaaagaggctaataaaatg

SEQ ID NO: 47832 - DNA, 20 bp, synthetic construct
  misc_feature 1..20: note = chemically synthesized
  source 1..20: mol_type = other DNA
agaggctaataaaatgaaga

SEQ ID NO: 47833 - DNA, 20 bp, synthetic construct
  misc_feature 1..20: note = chemically synthesized
  source 1..20: mol_type = other DNA
ctaataaaatgaagatagcc

SEQ ID NO: 47834 - DNA, 20 bp, synthetic construct
  misc_feature 1..20: note = chemically synthesized
  source 1..20: mol_type = other DNA
tgaagatagccaagcttcca

SEQ ID NO: 47835 - DNA, 20 bp, synthetic construct
  misc_feature 1..20: note = chemically synthesized
  source 1..20: mol_type = other DNA
agccaagcttccatggaatt

SEQ ID NO: 47836 - DNA, 20 bp, synthetic construct
  misc_feature 1..20: note = chemically synthesized
  source 1..20: mol_type = other DNA
gcttccatggaattaagcaa

SEQ ID NO: 47837 - DNA, 20 bp, synthetic construct
  misc_feature 1..20: note = chemically synthesized
  source 1..20: mol_type = other DNA
cttccatggaattaagcaac

SEQ ID NO: 47838 - DNA, 20 bp, synthetic construct
  misc_feature 1..20: note = chemically synthesized
  source 1..20: mol_type = other DNA
aggacaaccttgaccacttt

SEQ ID NO: 47839 - DNA, 20 bp, synthetic construct
  misc_feature 1..20: note = chemically synthesized
  source 1..20: mol_type = other DNA
ggacaaccttgaccactttg

SEQ ID NO: 47840 - DNA, 20 bp, synthetic construct
  misc_feature 1..20: note = chemically synthesized
  source 1..20: mol_type = other DNA
gacaaccttgaccactttga

SEQ ID NO: 47841 - DNA, 20 bp, synthetic construct
  misc_feature 1..20: note = chemically synthesized
  source 1..20: mol_type = other DNA
acaaccttgaccactttgag

SEQ ID NO: 47842 - DNA, 20 bp, synthetic construct
  misc_feature 1..20: note = chemically synthesized
  source 1..20: mol_type = other DNA
cttgaccactttgaggggtg

SEQ ID NO: 47843 - DNA, 20 bp, synthetic construct
  misc_feature 1..20: note = chemically synthesized
  source 1..20: mol_type = other DNA
gaccactttgaggggtgtgg

SEQ ID NO: 47844 - DNA, 20 bp, synthetic construct
  misc_feature 1..20: note = chemically synthesized
  source 1..20: mol_type = other DNA
accactttgaggggtgtggt

SEQ ID NO: 47845 - DNA, 20 bp, synthetic construct
  misc_feature 1..20: note = chemically synthesized
  source 1..20: mol_type = other DNA
ccactttgaggggtgtggtg

SEQ ID NO: 47846 - DNA, 20 bp, synthetic construct
  misc_feature 1..20: note = chemically synthesized
  source 1..20: mol_type = other DNA
cactttgaggggtgtggtgg

SEQ ID NO: 47847 - DNA, 20 bp, synthetic construct
  misc_feature 1..20: note = chemically synthesized
  source 1..20: mol_type = other DNA
ggtgtggtgggggccacatg

SEQ ID NO: 47848 - DNA, 20 bp, synthetic construct
  misc_feature 1..20: note = chemically synthesized
  source 1..20: mol_type = other DNA
tggtgggggccacatgcaga

SEQ ID NO: 47849 - DNA, 20 bp, synthetic construct
  misc_feature 1..20: note = chemically synthesized
  source 1..20: mol_type = other DNA
gtgggggccacatgcagatg

SEQ ID NO: 47850 - DNA, 20 bp, synthetic construct
  misc_feature 1..20: note = chemically synthesized
  source 1..20: mol_type = other DNA
ggggccacatgcagatggag

SEQ ID NO: 47851 - DNA, 20 bp, synthetic construct
  misc_feature 1..20: note = chemically synthesized
  source 1..20: mol_type = other DNA
gggccacatgcagatggagt

SEQ ID NO: 47852 - DNA, 20 bp, synthetic construct
  misc_feature 1..20: note = chemically synthesized
  source 1..20: mol_type = other DNA
catgcagatggagtgggtta

SEQ ID NO: 47853 - DNA, 20 bp, synthetic construct
  misc_feature 1..20: note = chemically synthesized
  source 1..20: mol_type = other DNA
tgcagatggagtgggttaaa

SEQ ID NO: 47854 - DNA, 20 bp, synthetic construct
  misc_feature 1..20: note = chemically synthesized
  source 1..20: mol_type = other DNA
ggagtgggttaaagagtgac

SEQ ID NO: 47855 - DNA, 20 bp, synthetic construct
  misc_feature 1..20: note = chemically synthesized
  source 1..20: mol_type = other DNA
gtgggttaaagagtgactag

SEQ ID NO: 47856 - DNA, 20 bp, synthetic construct
  misc_feature 1..20: note = chemically synthesized
  source 1..20: mol_type = other DNA
gggttaaagagtgactagaa

SEQ ID NO: 47857 - DNA, 20 bp, synthetic construct
  misc_feature 1..20: note = chemically synthesized
  source 1..20: mol_type = other DNA
ttaaagagtgactagaagag

SEQ ID NO: 47858 - DNA, 20 bp, synthetic construct
  misc_feature 1..20: note = chemically synthesized
  source 1..20: mol_type = other DNA
aagagtgactagaagagcag

SEQ ID NO: 47859 - DNA, 20 bp, synthetic construct
  misc_feature 1..20: note = chemically synthesized
  source 1..20: mol_type = other DNA
agagtgactagaagagcagt

SEQ ID NO: 47860 - DNA, 20 bp, synthetic construct
  misc_feature 1..20: note = chemically synthesized
  source 1..20: mol_type = other DNA
gagtgactagaagagcagtg

SEQ ID NO: 47861 - DNA, 20 bp, synthetic construct
  misc_feature 1..20: note = chemically synthesized
  source 1..20: mol_type = other DNA
agtgactagaagagcagtgg

SEQ ID NO: 47862 - DNA, 20 bp, synthetic construct
  misc_feature 1..20: note = chemically synthesized
  source 1..20: mol_type = other DNA
gactagaagagcagtggggg

SEQ ID NO: 47863 - DNA, 20 bp, synthetic construct
  misc_feature 1..20: note = chemically synthesized
  source 1..20: mol_type = other DNA
tagaagagcagtgggggtgg

SEQ ID NO: 47864 - DNA, 20 bp, synthetic construct
  misc_feature 1..20: note = chemically synthesized
  source 1..20: mol_type = other DNA
aagagcagtgggggtggcag

SEQ ID NO: 47865 - DNA, 20 bp, synthetic construct
  misc_feature 1..20: note = chemically synthesized
  source 1..20: mol_type = other DNA
agagcagtgggggtggcagc

SEQ ID NO: 47866 - DNA, 20 bp, synthetic construct
  misc_feature 1..20: note = chemically synthesized
  source 1..20: mol_type = other DNA
agcagtgggggtggcagcag

SEQ ID NO: 47867 - DNA, 20 bp, synthetic construct
  misc_feature 1..20: note = chemically synthesized
  source 1..20: mol_type = other DNA
cagtgggggtggcagcagga

SEQ ID NO: 47868 - DNA, 20 bp, synthetic construct
  misc_feature 1..20: note = chemically synthesized
  source 1..20: mol_type = other DNA
tgggggtggcagcaggagag

SEQ ID NO: 47869 - DNA, 20 bp, synthetic construct
  misc_feature 1..20: note = chemically synthesized
  source 1..20: mol_type = other DNA
gtggcagcaggagagaagcc

SEQ ID NO: 47870 - DNA, 20 bp, synthetic construct
  misc_feature 1..20: note = chemically synthesized
  source 1..20: mol_type = other DNA
ggagagaagcctggctctga

SEQ ID NO: 47871 - DNA, 20 bp, synthetic construct
  misc_feature 1..20: note = chemically synthesized
  source 1..20: mol_type = other DNA
gagaagcctggctctgaaag

SEQ ID NO: 47872 - DNA, 20 bp, synthetic construct
  misc_feature 1..20: note = chemically synthesized
  source 1..20: mol_type = other DNA
agcctggctctgaaagcagc

SEQ ID NO: 47873 - DNA, 20 bp, synthetic construct
  misc_feature 1..20: note = chemically synthesized
  source 1..20: mol_type = other DNA
tctgaaagcagcgagacttc

SEQ ID NO: 47874 - DNA, 20 bp, synthetic construct
  misc_feature 1..20: note = chemically synthesized
  source 1..20: mol_type = other DNA
ctgaaagcagcgagacttct

SEQ ID NO: 47875 - DNA, 20 bp, synthetic construct
  misc_feature 1..20: note = chemically synthesized
  source 1..20: mol_type = other DNA
tgaaagcagcgagacttcta

SEQ ID NO: 47876 - DNA, 20 bp, synthetic construct
  misc_feature 1..20: note = chemically synthesized
  source 1..20: mol_type = other DNA
agcgagacttctagggaata

SEQ ID NO: 47877 - DNA, 20 bp, synthetic construct
  misc_feature 1..20: note = chemically synthesized
  source 1..20: mol_type = other DNA
gcgagacttctagggaatac

SEQ ID NO: 47878 - DNA, 20 bp, synthetic construct
  misc_feature 1..20: note = chemically synthesized
  source 1..20: mol_type = other DNA
cgagacttctagggaataca

SEQ ID NO: 47879 - DNA, 20 bp, synthetic construct
  misc_feature 1..20: note = chemically synthesized
  source 1..20: mol_type = other DNA
acttctagggaatacagggt

SEQ ID NO: 47880 - DNA, 20 bp, synthetic construct
  misc_feature 1..20: note = chemically synthesized
  source 1..20: mol_type = other DNA
cttctagggaatacagggtc

SEQ ID NO: 47881 - DNA, 20 bp, synthetic construct
  misc_feature 1..20: note = chemically synthesized
  source 1..20: mol_type = other DNA
ttctagggaatacagggtca

SEQ ID NO: 47882 - DNA, 20 bp, synthetic construct
  misc_feature 1..20: note = chemically synthesized
  source 1..20: mol_type = other DNA
tctagggaatacagggtcag

SEQ ID NO: 47883 - DNA, 20 bp, synthetic construct
  misc_feature 1..20: note = chemically synthesized
  source 1..20: mol_type = other DNA
tagggaatacagggtcaggg

SEQ ID NO: 47884 - DNA, 20 bp, synthetic construct
  misc_feature 1..20: note = chemically synthesized
  source 1..20: mol_type = other DNA
agggaatacagggtcagggg

SEQ ID NO: 47885 - DNA, 20 bp, synthetic construct
  misc_feature 1..20: note = chemically synthesized
  source 1..20: mol_type = other DNA
agggtcaggggaggttctga

SEQ ID NO: 47886 - DNA, 20 bp, synthetic construct
  misc_feature 1..20: note = chemically synthesized
  source 1..20: mol_type = other DNA
ttctgaaagatgacacactg

SEQ ID NO: 47887 - DNA, 20 bp, synthetic construct
  misc_feature 1..20: note = chemically synthesized
  source 1..20: mol_type = other DNA
ctgaaagatgacacactgca

SEQ ID NO: 47888 - DNA, 20 bp, synthetic construct
  misc_feature 1..20: note = chemically synthesized
  source 1..20: mol_type = other DNA
tgtgtttgtatgccgatgac

SEQ ID NO: 47889 - DNA, 20 bp, synthetic construct
  misc_feature 1..20: note = chemically synthesized
  source 1..20: mol_type = other DNA
gtatgccgatgacaagtatc

SEQ ID NO: 47890 - DNA, 20 bp, synthetic construct
  misc_feature 1..20: note = chemically synthesized
  source 1..20: mol_type = other DNA
tgccgatgacaagtatccag

SEQ ID NO: 47891 - DNA, 20 bp, synthetic construct
  misc_feature 1..20: note = chemically synthesized
  source 1..20: mol_type = other DNA
gatgacaagtatccagtaga

SEQ ID NO: 47892 - DNA, 20 bp, synthetic construct
  misc_feature 1..20: note = chemically synthesized
  source 1..20: mol_type = other DNA
atgacaagtatccagtagaa

SEQ ID NO: 47893 - DNA, 20 bp, synthetic construct
  misc_feature 1..20: note = chemically synthesized
  source 1..20: mol_type = other DNA
acaagtatccagtagaaagg

SEQ ID NO: 47894 - DNA, 20 bp, synthetic construct
  misc_feature 1..20: note = chemically synthesized
  source 1..20: mol_type = other DNA
ccagtagaaaggcagatgaa

SEQ ID NO: 47895 - DNA, 20 bp, synthetic construct
  misc_feature 1..20: note = chemically synthesized
  source 1..20: mol_type = other DNA
gatgaacagattctcattct

SEQ ID NO: 47896 - DNA, 20 bp, synthetic construct
  misc_feature 1..20: note = chemically synthesized
  source 1..20: mol_type = other DNA
aacagattctcattctcaga

SEQ ID NO: 47897 - DNA, 20 bp, synthetic construct
  misc_feature 1..20: note = chemically synthesized
  source 1..20: mol_type = other DNA
acagattctcattctcagaa

SEQ ID NO: 47898 - DNA, 20 bp, synthetic construct
  misc_feature 1..20: note = chemically synthesized
  source 1..20: mol_type = other DNA
aaggcctgtcctgacctcct

SEQ ID NO: 47899 - DNA, 20 bp, synthetic construct
  misc_feature 1..20: note = chemically synthesized
  source 1..20: mol_type = other DNA
ggcctgtcctgacctcctga

SEQ ID NO: 47900 - DNA, 20 bp, synthetic construct
  misc_feature 1..20: note = chemically synthesized
  source 1..20: mol_type = other DNA
cctgacctcctgagagtaca

SEQ ID NO: 47901 - DNA, 20 bp, synthetic construct
  misc_feature 1..20: note = chemically synthesized
  source 1..20: mol_type = other DNA
cctgagagtacacagaccat

SEQ ID NO: 47902 - DNA, 20 bp, synthetic construct
  misc_feature 1..20: note = chemically synthesized
  source 1..20: mol_type = other DNA
ctgagagtacacagaccatg

SEQ ID NO: 47903 - DNA, 20 bp, synthetic construct
  misc_feature 1..20: note = chemically synthesized
  source 1..20: mol_type = other DNA
tgagagtacacagaccatga

SEQ ID NO: 47904 - DNA, 20 bp, synthetic construct
  misc_feature 1..20: note = chemically synthesized
  source 1..20: mol_type = other DNA
gagtacacagaccatgaggg

SEQ ID NO: 47905 - DNA, 20 bp, synthetic construct
  misc_feature 1..20: note = chemically synthesized
  source 1..20: mol_type = other DNA
agtacacagaccatgagggc

SEQ ID NO: 47906 - DNA, 20 bp, synthetic construct
  misc_feature 1..20: note = chemically synthesized
  source 1..20: mol_type = other DNA
gtacacagaccatgagggca

SEQ ID NO: 47907 - DNA, 20 bp, synthetic construct
  misc_feature 1..20: note = chemically synthesized
  source 1..20: mol_type = other DNA
acagaccatgagggcagggc

SEQ ID NO: 47908 - DNA, 20 bp, synthetic construct
  misc_feature 1..20: note = chemically synthesized
  source 1..20: mol_type = other DNA
cagaccatgagggcagggca

SEQ ID NO: 47909 - DNA, 20 bp, synthetic construct
  misc_feature 1..20: note = chemically synthesized
  source 1..20: mol_type = other DNA
gaccatgagggcagggcaag

SEQ ID NO: 47910 - DNA, 20 bp, synthetic construct
  misc_feature 1..20: note = chemically synthesized
  source 1..20: mol_type = other DNA
accatgagggcagggcaagg

SEQ ID NO: 47911 - DNA, 20 bp, synthetic construct
  misc_feature 1..20: note = chemically synthesized
  source 1..20: mol_type = other DNA
catgagggcagggcaaggag

SEQ ID NO: 47912 - DNA, 20 bp, synthetic construct
  misc_feature 1..20: note = chemically synthesized
  source 1..20: mol_type = other DNA
atgagggcagggcaaggagg

SEQ ID NO: 47913 - DNA, 20 bp, synthetic construct
  misc_feature 1..20: note = chemically synthesized
  source 1..20: mol_type = other DNA
cacgctcactgtttcatgca

SEQ ID NO: 47914 - DNA, 20 bp, synthetic construct
  misc_feature 1..20: note = chemically synthesized
  source 1..20: mol_type = other DNA
actgtttcatgcaaagtcct

SEQ ID NO: 47915 - DNA, 20 bp, synthetic construct
  misc_feature 1..20: note = chemically synthesized
  source 1..20: mol_type = other DNA
tcatgcaaagtccttggcca

SEQ ID NO: 47916 - DNA, 20 bp, synthetic construct
  misc_feature 1..20: note = chemically synthesized
  source 1..20: mol_type = other DNA
caatttaatatgctctatgc

SEQ ID NO: 47917 - DNA, 20 bp, synthetic construct
  misc_feature 1..20: note = chemically synthesized
  source 1..20: mol_type = other DNA
tatgctctatgctggaaaac

SEQ ID NO: 47918 - DNA, 20 bp, synthetic construct
  misc_feature 1..20: note = chemically synthesized
  source 1..20: mol_type = other DNA
tggaaaactggattattgaa

SEQ ID NO: 47919 - DNA, 20 bp, synthetic construct
  misc_feature 1..20: note = chemically synthesized
  source 1..20: mol_type = other DNA
ggaaaactggattattgaac

SEQ ID NO: 47920 - DNA, 20 bp, synthetic construct
  misc_feature 1..20: note = chemically synthesized
  source 1..20: mol_type = other DNA
ctggattattgaacaggcat

SEQ ID NO: 47921 - DNA, 20 bp, synthetic construct
  misc_feature 1..20: note = chemically synthesized
  source 1..20: mol_type = other DNA
tctgaacctaatccactaaa

SEQ ID NO: 47922 - DNA, 20 bp, synthetic construct
  misc_feature 1..20: note = chemically synthesized
  source 1..20: mol_type = other DNA
atccactaaaaagcacttga

SEQ ID NO: 47923 - DNA, 20 bp, synthetic construct
  misc_feature 1..20: note = chemically synthesized
  source 1..20: mol_type = other DNA
agatatatcaaaatatcatt

SEQ ID NO: 47924 - DNA, 20 bp, synthetic construct
  misc_feature 1..20: note = chemically synthesized
  source 1..20: mol_type = other DNA
atcaaaatatcattgagaaa

SEQ ID NO: 47925 - DNA, 20 bp, synthetic construct
  misc_feature 1..20: note = chemically synthesized
  source 1..20: mol_type = other DNA
tcattgagaaatagatattt

SEQ ID NO: 47926 - DNA, 20 bp, synthetic construct
  misc_feature 1..20: note = chemically synthesized
  source 1..20: mol_type = other DNA
cattgagaaatagatatttt

SEQ ID NO: 47927 - DNA, 20 bp, synthetic construct
  misc_feature 1..20: note = chemically synthesized
  source 1..20: mol_type = other DNA
ctcatttgaactctcttttc

SEQ ID NO: 47928 - DNA, 20 bp, synthetic construct
  misc_feature 1..20: note = chemically synthesized
  source 1..20: mol_type = other DNA
tcatttgaactctcttttcc

SEQ ID NO: 47929 - DNA, 20 bp, synthetic construct
  misc_feature 1..20: note = chemically synthesized
  source 1..20: mol_type = other DNA
tttgaactctcttttccagg

SEQ ID NO: 47930 - DNA, 20 bp, synthetic construct
  misc_feature 1..20: note = chemically synthesized
  source 1..20: mol_type = other DNA
tgaactctcttttccaggaa

SEQ ID NO: 47931 - DNA, 20 bp, synthetic construct
  misc_feature 1..20: note = chemically synthesized
  source 1..20: mol_type = other DNA
tttccaggaagagttgtgct

SEQ ID NO: 47932 - DNA, 20 bp, synthetic construct
  misc_feature 1..20: note = chemically synthesized
  source 1..20: mol_type = other DNA
ttccaggaagagttgtgctt

SEQ ID NO: 47933 - DNA, 20 bp, synthetic construct
  misc_feature 1..20: note = chemically synthesized
  source 1..20: mol_type = other DNA
ttgtgcttgggtaaattcta

SEQ ID NO: 47934 - DNA, 20 bp, synthetic construct
  misc_feature 1..20: note = chemically synthesized
  source 1..20: mol_type = other DNA
tgggtaaattctatagctca

SEQ ID NO: 47935 - DNA, 20 bp, synthetic construct
  misc_feature 1..20: note = chemically synthesized
  source 1..20: mol_type = other DNA
aaaacacacaataaattaat

SEQ ID NO: 47936 - DNA, 20 bp, synthetic construct
  misc_feature 1..20: note = chemically synthesized
  source 1..20: mol_type = other DNA
aaacacacaataaattaata

SEQ ID NO: 47937 - DNA, 20 bp, synthetic construct
  misc_feature 1..20: note = chemically synthesized
  source 1..20: mol_type = other DNA
aattaataaggtgcttccta

SEQ ID NO: 47938 - DNA, 20 bp, synthetic construct
  misc_feature 1..20: note = chemically synthesized
  source 1..20: mol_type = other DNA
aataaggtgcttcctacagt

SEQ ID NO: 47939 - DNA, 20 bp, synthetic construct
  misc_feature 1..20: note = chemically synthesized
  source 1..20: mol_type = other DNA
ggtgcttcctacagtgagtt

SEQ ID NO: 47940 - DNA, 20 bp, synthetic construct
  misc_feature 1..20: note = chemically synthesized
  source 1..20: mol_type = other DNA
gagttcagttaaacattttg

SEQ ID NO: 47941 - DNA, 20 bp, synthetic construct
  misc_feature 1..20: note = chemically synthesized
  source 1..20: mol_type = other DNA
gttcagttaaacattttgaa

SEQ ID NO: 47942 - DNA, 20 bp, synthetic construct
  misc_feature 1..20: note = chemically synthesized
  source 1..20: mol_type = other DNA
tgaagagtgtttttgaaatg

SEQ ID NO: 47943 - DNA, 20 bp, synthetic construct
  misc_feature 1..20: note = chemically synthesized
  source 1..20: mol_type = other DNA
agagtgtttttgaaatgtag

SEQ ID NO: 47944 - DNA, 20 bp, synthetic construct
  misc_feature 1..20: note = chemically synthesized
  source 1..20: mol_type = other DNA
agtgtttttgaaatgtagca

SEQ ID NO: 47945 - DNA, 20 bp, synthetic construct
  misc_feature 1..20: note = chemically synthesized
  source 1..20: mol_type = other DNA
gtttttgaaatgtagcagag

SEQ ID NO: 47946 - DNA, 20 bp, synthetic construct
  misc_feature 1..20: note = chemically synthesized
  source 1..20: mol_type = other DNA
tttttgaaatgtagcagagc

SEQ ID NO: 47947 - DNA, 20 bp, synthetic construct
  misc_feature 1..20: note = chemically synthesized
  source 1..20: mol_type = other DNA
ggctacaattgatattcaaa

SEQ ID NO: 47948 - DNA, 20 bp, synthetic construct
  misc_feature 1..20: note = chemically synthesized
  source 1..20: mol_type = other DNA
ctacaattgatattcaaaaa

SEQ ID NO: 47949 - DNA, 20 bp, synthetic construct
  misc_feature 1..20: note = chemically synthesized
  source 1..20: mol_type = other DNA
tacaattgatattcaaaaag

SEQ ID NO: 47950 - DNA, 20 bp, synthetic construct
  misc_feature 1..20: note = chemically synthesized
  source 1..20: mol_type = other DNA
atttatttccccctttaact

SEQ ID NO: 47951 - DNA, 20 bp, synthetic construct
  misc_feature 1..20: note = chemically synthesized
  source 1..20: mol_type = other DNA
tgtcattttattatgcttca

SEQ ID NO: 47952 - DNA, 20 bp, synthetic construct
  misc_feature 1..20: note = chemically synthesized
  source 1..20: mol_type = other DNA
tcattttattatgcttcata

SEQ ID NO: 47953 - DNA, 20 bp, synthetic construct
  misc_feature 1..20: note = chemically synthesized
  source 1..20: mol_type = other DNA
cttcatagagcatcactgct

SEQ ID NO: 47954 - DNA, 20 bp, synthetic construct
  misc_feature 1..20: note = chemically synthesized
  source 1..20: mol_type = other DNA
cactgctgagatcccctccc

SEQ ID NO: 47955 - DNA, 20 bp, synthetic construct
  misc_feature 1..20: note = chemically synthesized
  source 1..20: mol_type = other DNA
ccctccccagctcatgttgc

SEQ ID NO: 47956 - DNA, 20 bp, synthetic construct
  misc_feature 1..20: note = chemically synthesized
  source 1..20: mol_type = other DNA
cctccccagctcatgttgct

SEQ ID NO: 47957 - DNA, 20 bp, synthetic construct
  misc_feature 1..20: note = chemically synthesized
  source 1..20: mol_type = other DNA
tgctaggaaatatcccaaaa

SEQ ID NO: 47958 - DNA, 20 bp, synthetic construct
  misc_feature 1..20: note = chemically synthesized
  source 1..20: mol_type = other DNA
ttgtttctctgattcacctc

SEQ ID NO: 47959 - DNA, 20 bp, synthetic construct
  misc_feature 1..20: note = chemically synthesized
  source 1..20: mol_type = other DNA
tgtttctctgattcacctcc

SEQ ID NO: 47960 - DNA, 20 bp, synthetic construct
  misc_feature 1..20: note = chemically synthesized
  source 1..20: mol_type = other DNA
gtttctctgattcacctcca

SEQ ID NO: 47961 - DNA, 20 bp, synthetic construct
  misc_feature 1..20: note = chemically synthesized
  source 1..20: mol_type = other DNA
attcacctccagggctcata

SEQ ID NO: 47962 - DNA, 20 bp, synthetic construct
  misc_feature 1..20: note = chemically synthesized
  source 1..20: mol_type = other DNA
ctccagggctcatatggcaa

SEQ ID NO: 47963 - DNA, 20 bp, synthetic construct
  misc_feature 1..20: note = chemically synthesized
  source 1..20: mol_type = other DNA
tccagggctcatatggcaat

SEQ ID NO: 47964 - DNA, 20 bp, synthetic construct
  misc_feature 1..20: note = chemically synthesized
  source 1..20: mol_type = other DNA
ccagggctcatatggcaatg

SEQ ID NO: 47965 - DNA, 20 bp, synthetic construct
  misc_feature 1..20: note = chemically synthesized
  source 1..20: mol_type = other DNA
atatggcaatggggatttaa

SEQ ID NO: 47966 - DNA, 20 bp, synthetic construct
  misc_feature 1..20: note = chemically synthesized
  source 1..20: mol_type = other DNA
tatggcaatggggatttaat

SEQ ID NO: 47967 - DNA, 20 bp, synthetic construct
  misc_feature 1..20: note = chemically synthesized
  source 1..20: mol_type = other DNA
atggcaatggggatttaata

SEQ ID NO: 47968 - DNA, 20 bp, synthetic construct
  misc_feature 1..20: note = chemically synthesized
  source 1..20: mol_type = other DNA
atttaatagggtttatttgt

SEQ ID NO: 47969 - DNA, 20 bp, synthetic construct
  misc_feature 1..20: note = chemically synthesized
  source 1..20: mol_type = other DNA
atagggtttatttgttggtg

SEQ ID NO: 47970 - DNA, 20 bp, synthetic construct
  misc_feature 1..20: note = chemically synthesized
  source 1..20: mol_type = other DNA
acattaaacaaatcttttaa

SEQ ID NO: 47971 - DNA, 20 bp, synthetic construct
  misc_feature 1..20: note = chemically synthesized
  source 1..20: mol_type = other DNA
cattaaacaaatcttttaat

SEQ ID NO: 47972 - DNA, 20 bp, synthetic construct
  misc_feature 1..20: note = chemically synthesized
  source 1..20: mol_type = other DNA
ggaaaaatacttttatatta

SEQ ID NO: 47973 - DNA, 20 bp, synthetic construct
  misc_feature 1..20: note = chemically synthesized
  source 1..20: mol_type = other DNA
gaaaaatacttttatattat

SEQ ID NO: 47974 - DNA, 20 bp, synthetic construct
  misc_feature 1..20: note = chemically synthesized
  source 1..20: mol_type = other DNA
tttatattataggcaaaatg

SEQ ID NO: 47975 - DNA, 20 bp, synthetic construct
  misc_feature 1..20: note = chemically synthesized
  source 1..20: mol_type = other DNA
gtagatgtatattgctactg

SEQ ID NO: 47976 - DNA, 20 bp, synthetic construct
  misc_feature 1..20: note = chemically synthesized
  source 1..20: mol_type = other DNA
aagtaaatgtattttattaa

SEQ ID NO: 47977 - DNA, 20 bp, synthetic construct
  misc_feature 1..20: note = chemically synthesized
  source 1..20: mol_type = other DNA
atgtattttattaatggtgt

SEQ ID NO: 47978 - DNA, 20 bp, synthetic construct
  misc_feature 1..20: note = chemically synthesized
  source 1..20: mol_type = other DNA
tgagaatttcttcctcactg

SEQ ID NO: 47979 - DNA, 20 bp, synthetic construct
  misc_feature 1..20: note = chemically synthesized
  source 1..20: mol_type = other DNA
atgcatatttgcatgtgtaa

SEQ ID NO: 47980 - DNA, 20 bp, synthetic construct
  misc_feature 1..20: note = chemically synthesized
  source 1..20: mol_type = other DNA
atttgcatgtgtaaaagact

SEQ ID NO: 47981 - DNA, 20 bp, synthetic construct
  misc_feature 1..20: note = chemically synthesized
  source 1..20: mol_type = other DNA
aagacttagcaatttgtgaa

SEQ ID NO: 47982 - DNA, 20 bp, synthetic construct
  misc_feature 1..20: note = chemically synthesized
  source 1..20: mol_type = other DNA
acttagcaatttgtgaatag

SEQ ID NO: 47983 - DNA, 20 bp, synthetic construct
  misc_feature 1..20: note = chemically synthesized
  source 1..20: mol_type = other DNA
atgtttctccgcttctcact

SEQ ID NO: 47984 - DNA, 20 bp, synthetic construct
  misc_feature 1..20: note = chemically synthesized
  source 1..20: mol_type = other DNA
tctccgcttctcactgagca

SEQ ID NO: 47985 - DNA, 20 bp, synthetic construct
  misc_feature 1..20: note = chemically synthesized
  source 1..20: mol_type = other DNA
ctcactgagcatggctgtaa

SEQ ID NO: 47986 - DNA, 20 bp, synthetic construct
  misc_feature 1..20: note = chemically synthesized
  source 1..20: mol_type = other DNA
aagaaactttttcctctccc

SEQ ID NO: 47987 - DNA, 20 bp, synthetic construct
  misc_feature 1..20: note = chemically synthesized
  source 1..20: mol_type = other DNA
agaaactttttcctctcccc

SEQ ID NO: 47988 - DNA, 20 bp, synthetic construct
  misc_feature 1..20: note = chemically synthesized
  source 1..20: mol_type = other DNA
tttcctctccccgggcattc

SEQ ID NO: 47989 - DNA, 20 bp, synthetic construct
  misc_feature 1..20: note = chemically synthesized
  source 1..20: mol_type = other DNA
ccgggcattccagcacacat

SEQ ID NO: 47990 - DNA, 20 bp, synthetic construct
  misc_feature 1..20: note = chemically synthesized
  source 1..20: mol_type = other DNA
gcattccagcacacattgga

SEQ ID NO: 47991 - DNA, 20 bp, synthetic construct
  misc_feature 1..20: note = chemically synthesized
  source 1..20: mol_type = other DNA
ttggaaagataacacgtcca

SEQ ID NO: 47992 - DNA, 20 bp, synthetic construct
  misc_feature 1..20: note = chemically synthesized
  source 1..20: mol_type = other DNA
aaagataacacgtccacaga

SEQ ID NO: 47993 - DNA, 20 bp, synthetic construct
  misc_feature 1..20: note = chemically synthesized
  source 1..20: mol_type = other DNA
taacacgtccacagaaagcc

SEQ ID NO: 47994 - DNA, 20 bp, synthetic construct
  misc_feature 1..20: note = chemically synthesized
  source 1..20: mol_type = other DNA
cagaaagcctggctttccaa

SEQ ID NO: 47995 - DNA, 20 bp, synthetic construct
  misc_feature 1..20: note = chemically synthesized
  source 1..20: mol_type = other DNA
gaaagcctggctttccaaaa

SEQ ID NO: 47996 - DNA, 20 bp, synthetic construct
  misc_feature 1..20: note = chemically synthesized
  source 1..20: mol_type = other DNA
ggctttccaaaagagcttat

SEQ ID NO: 47997 - DNA, 20 bp, synthetic construct
  misc_feature 1..20: note = chemically synthesized
  source 1..20: mol_type = other DNA
ctttccaaaagagcttatca

SEQ ID NO: 47998 - DNA, 20 bp, synthetic construct
  misc_feature 1..20: note = chemically synthesized
  source 1..20: mol_type = other DNA
ttatcagagaatgtgccccc

SEQ ID NO: 47999 - DNA, 20 bp, synthetic construct
  misc_feature 1..20: note = chemically synthesized
  source 1..20: mol_type = other DNA
tatcagagaatgtgcccccc

SEQ ID NO: 48000 - DNA, 20 bp, synthetic construct
  misc_feature 1..20: note = chemically synthesized
  source 1..20: mol_type = other DNA
taaaacatatgttaatcctg

SEQ ID NO: 48001 - DNA, 20 bp, synthetic construct
  misc_feature 1..20: note = chemically synthesized
  source 1..20: mol_type = other DNA
aacatatgttaatcctgtgg

SEQ ID NO: 48002 - DNA, 20 bp, synthetic construct
  misc_feature 1..20: note = chemically synthesized
  source 1..20: mol_type = other DNA
catatgttaatcctgtggca

SEQ ID NO: 48003 - DNA, 20 bp, synthetic construct
  misc_feature 1..20: note = chemically synthesized
  source 1..20: mol_type = other DNA
atgttaatcctgtggcagag

SEQ ID NO: 48004 - DNA, 20 bp, synthetic construct
  misc_feature 1..20: note = chemically synthesized
  source 1..20: mol_type = other DNA
tgtggcagagaagtttgttc

SEQ ID NO: 48005 - DNA, 20 bp, synthetic construct
  misc_feature 1..20: note = chemically synthesized
  source 1..20: mol_type = other DNA
gagaagtttgttctagcctt

SEQ ID NO: 48006 - DNA, 20 bp, synthetic construct
  misc_feature 1..20: note = chemically synthesized
  source 1..20: mol_type = other DNA
agaagtttgttctagccttt

SEQ ID NO: 48007 - DNA, 20 bp, synthetic construct
  misc_feature 1..20: note = chemically synthesized
  source 1..20: mol_type = other DNA
tttgttctagcctttgggtg

SEQ ID NO: 48008 - DNA, 20 bp, synthetic construct
  misc_feature 1..20: note = chemically synthesized
  source 1..20: mol_type = other DNA
ttgggtgtagcctgctgaat

SEQ ID NO: 48009 - DNA, 20 bp, synthetic construct
  misc_feature 1..20: note = chemically synthesized
  source 1..20: mol_type = other DNA
tagcctgctgaataagttca

SEQ ID NO: 48010 - DNA, 20 bp, synthetic construct
  misc_feature 1..20: note = chemically synthesized
  source 1..20: mol_type = other DNA
gttcacagtgatctacatcc

SEQ ID NO: 48011 - DNA, 20 bp, synthetic construct
  misc_feature 1..20: note = chemically synthesized
  source 1..20: mol_type = other DNA
gatctacatcctagtttcca

SEQ ID NO: 48012 - DNA, 20 bp, synthetic construct
  misc_feature 1..20: note = chemically synthesized
  source 1..20: mol_type = other DNA
atctacatcctagtttccat

SEQ ID NO: 48013 - DNA, 20 bp, synthetic construct
  misc_feature 1..20: note = chemically synthesized
  source 1..20: mol_type = other DNA
ctagtttccatgggctgaaa

SEQ ID NO: 48014 - DNA, 20 bp, synthetic construct
  misc_feature 1..20: note = chemically synthesized
  source 1..20: mol_type = other DNA
ccctgcactccctacacaca

SEQ ID NO: 48015 - DNA, 20 bp, synthetic construct
  misc_feature 1..20: note = chemically synthesized
  source 1..20: mol_type = other DNA
actccctacacacacagaca

SEQ ID NO: 48016 - DNA, 20 bp, synthetic construct
  misc_feature 1..20: note = chemically synthesized
  source 1..20: mol_type = other DNA
ttctttgatattttcttgaa

SEQ ID NO: 48017 - DNA, 20 bp, synthetic construct
  misc_feature 1..20: note = chemically synthesized
  source 1..20: mol_type = other DNA
ttcaaatgtgtttgacttta

SEQ ID NO: 48018 - DNA, 20 bp, synthetic construct
  misc_feature 1..20: note = chemically synthesized
  source 1..20: mol_type = other DNA
tcaacttgtaaaattttatc

SEQ ID NO: 48019 - DNA, 20 bp, synthetic construct
  misc_feature 1..20: note = chemically synthesized
  source 1..20: mol_type = other DNA
aaattttatctggtaattta

SEQ ID NO: 48020 - DNA, 20 bp, synthetic construct
  misc_feature 1..20: note = chemically synthesized
  source 1..20: mol_type = other DNA
taatttatagattaaattgc

SEQ ID NO: 48021 - DNA, 20 bp, synthetic construct
  misc_feature 1..20: note = chemically synthesized
  source 1..20: mol_type = other DNA
agcatctacctccctttcat

SEQ ID NO: 48022 - DNA, 20 bp, synthetic construct
  misc_feature 1..20: note = chemically synthesized
  source 1..20: mol_type = other DNA
ctttcatcagactctccctg

SEQ ID NO: 48023 - DNA, 20 bp, synthetic construct
  misc_feature 1..20: note = chemically synthesized
  source 1..20: mol_type = other DNA
tttcatcagactctccctgc

SEQ ID NO: 48024 - DNA, 20 bp, synthetic construct
  misc_feature 1..20: note = chemically synthesized
  source 1..20: mol_type = other DNA
ttcatcagactctccctgca

SEQ ID NO: 48025 - DNA, 20 bp, synthetic construct
  misc_feature 1..20: note = chemically synthesized
  source 1..20: mol_type = other DNA
tcagactctccctgcagggc

SEQ ID NO: 48026 - DNA, 20 bp, synthetic construct
  misc_feature 1..20: note = chemically synthesized
  source 1..20: mol_type = other DNA
tctaactatgtatgtgcttc

SEQ ID NO: 48027 - DNA, 20 bp, synthetic construct
  misc_feature 1..20: note = chemically synthesized
  source 1..20: mol_type = other DNA
actatgtatgtgcttcaaga

SEQ ID NO: 48028 - DNA, 20 bp, synthetic construct
  misc_feature 1..20: note = chemically synthesized
  source 1..20: mol_type = other DNA
tgcttcaagatggaactcct

SEQ ID NO: 48029 - DNA, 20 bp, synthetic construct
  misc_feature 1..20: note = chemically synthesized
  source 1..20: mol_type = other DNA
agatggaactcctgagttca

SEQ ID NO: 48030 - DNA, 20 bp, synthetic construct
  misc_feature 1..20: note = chemically synthesized
  source 1..20: mol_type = other DNA
gatggaactcctgagttcac

SEQ ID NO: 48031 - DNA, 20 bp, synthetic construct
  misc_feature 1..20: note = chemically synthesized
  source 1..20: mol_type = other DNA
cacaggtgatttataaacca

SEQ ID NO: 48032 - DNA, 20 bp, synthetic construct
  misc_feature 1..20: note = chemically synthesized
  source 1..20: mol_type = other DNA
actacaaaactctcaccctc

SEQ ID NO: 48033 - DNA, 20 bp, synthetic construct
  misc_feature 1..20: note = chemically synthesized
  source 1..20: mol_type = other DNA
tacaaaactctcaccctcca

SEQ ID NO: 48034 - DNA, 20 bp, synthetic construct
  misc_feature 1..20: note = chemically synthesized
  source 1..20: mol_type = other DNA
accctccagagatttgcctc

SEQ ID NO: 48035 - DNA, 20 bp, synthetic construct
  misc_feature 1..20: note = chemically synthesized
  source 1..20: mol_type = other DNA
ccctccagagatttgcctca

SEQ ID NO: 48036 - DNA, 20 bp, synthetic construct
  misc_feature 1..20: note = chemically synthesized
  source 1..20: mol_type = other DNA
cctccagagatttgcctcaa

SEQ ID NO: 48037 - DNA, 20 bp, synthetic construct
  misc_feature 1..20: note = chemically synthesized
  source 1..20: mol_type = other DNA
gggacaacaccctgctcaca

SEQ ID NO: 48038 - DNA, 20 bp, synthetic construct
  misc_feature 1..20: note = chemically synthesized
  source 1..20: mol_type = other DNA
ggacaacaccctgctcacaa

SEQ ID NO: 48039 - DNA, 20 bp, synthetic construct
  misc_feature 1..20: note = chemically synthesized
  source 1..20: mol_type = other DNA
caccctgctcacaaaggcac

SEQ ID NO: 48040 - DNA, 20 bp, synthetic construct
  misc_feature 1..20: note = chemically synthesized
  source 1..20: mol_type = other DNA
cctgctcacaaaggcaccag

SEQ ID NO: 48041 - DNA, 20 bp, synthetic construct
  misc_feature 1..20: note = chemically synthesized
  source 1..20: mol_type = other DNA
ctgctcacaaaggcaccagc

SEQ ID NO: 48042 - DNA, 20 bp, synthetic construct
  misc_feature 1..20: note = chemically synthesized
  source 1..20: mol_type = other DNA
caggcaactgctcaactacc

SEQ ID NO: 48043 - DNA, 20 bp, synthetic construct
  misc_feature 1..20: note = chemically synthesized
  source 1..20: mol_type = other DNA
gcaactgctcaactacctgg

SEQ ID NO: 48044 - DNA, 20 bp, synthetic construct
  misc_feature 1..20: note = chemically synthesized
  source 1..20: mol_type = other DNA
tgctcaactacctggtggat

SEQ ID NO: 48045 - DNA, 20 bp, synthetic construct
  misc_feature 1..20: note = chemically synthesized
  source 1..20: mol_type = other DNA
gctcaactacctggtggata

SEQ ID NO: 48046 - DNA, 20 bp, synthetic construct
  misc_feature 1..20: note = chemically synthesized
  source 1..20: mol_type = other DNA
acctggtggataaggtgccc

SEQ ID NO: 48047 - DNA, 20 bp, synthetic construct
  misc_feature 1..20: note = chemically synthesized
  source 1..20: mol_type = other DNA
ggtggataaggtgcccaagc

SEQ ID NO: 48048 - DNA, 20 bp, synthetic construct
  misc_feature 1..20: note = chemically synthesized
  source 1..20: mol_type = other DNA
ataaggtgcccaagctagca

SEQ ID NO: 48049 - DNA, 20 bp, synthetic construct
  misc_feature 1..20: note = chemically synthesized
  source 1..20: mol_type = other DNA
cctcctctgttgccttttaa

SEQ ID NO: 48050 - DNA, 20 bp, synthetic construct
  misc_feature 1..20: note = chemically synthesized
  source 1..20: mol_type = other DNA
agtgccactttctgctccta

SEQ ID NO: 48051 - DNA, 20 bp, synthetic construct
  misc_feature 1..20: note = chemically synthesized
  source 1..20: mol_type = other DNA
cactttctgctcctaaagtg

SEQ ID NO: 48052 - DNA, 20 bp, synthetic construct
  misc_feature 1..20: note = chemically synthesized
  source 1..20: mol_type = other DNA
tttctgctcctaaagtgaag

SEQ ID NO: 48053 - DNA, 20 bp, synthetic construct
  misc_feature 1..20: note = chemically synthesized
  source 1..20: mol_type = other DNA
gctcctaaagtgaagtagta

SEQ ID NO: 48054 - DNA, 20 bp, synthetic construct
  misc_feature 1..20: note = chemically synthesized
  source 1..20: mol_type = other DNA
cctaaagtgaagtagtacgg

SEQ ID NO: 48055 - DNA, 20 bp, synthetic construct
  misc_feature 1..20: note = chemically synthesized
  source 1..20: mol_type = other DNA
ctaaagtgaagtagtacggc

SEQ ID NO: 48056 - DNA, 20 bp, synthetic construct
  misc_feature 1..20: note = chemically synthesized
  source 1..20: mol_type = other DNA
actgctgcatttcttcccct

SEQ ID NO: 48057 - DNA, 20 bp, synthetic construct
  misc_feature 1..20: note = chemically synthesized
  source 1..20: mol_type = other DNA
ctgcatttcttcccctaagc

SEQ ID NO: 48058 - DNA, 20 bp, synthetic construct
  misc_feature 1..20: note = chemically synthesized
  source 1..20: mol_type = other DNA
ttcttcccctaagctagctt

SEQ ID NO: 48059 - DNA, 20 bp, synthetic construct
  misc_feature 1..20: note = chemically synthesized
  source 1..20: mol_type = other DNA
ttcccctaagctagctttgg

SEQ ID NO: 48060 - DNA, 20 bp, synthetic construct
  misc_feature 1..20: note = chemically synthesized
  source 1..20: mol_type = other DNA
gcaaatcactttctttatac

SEQ ID NO: 48061 - DNA, 20 bp, synthetic construct
  misc_feature 1..20: note = chemically synthesized
  source 1..20: mol_type = other DNA
cagacttctctcttcttaat

SEQ ID NO: 48062 - DNA, 20 bp, synthetic construct
  misc_feature 1..20: note = chemically synthesized
  source 1..20: mol_type = other DNA
tcttcttaattggattctgc

SEQ ID NO: 48063 - DNA, 20 bp, synthetic construct
  misc_feature 1..20: note = chemically synthesized
  source 1..20: mol_type = other DNA
tcttaattggattctgcaag

SEQ ID NO: 48064 - DNA, 20 bp, synthetic construct
  misc_feature 1..20: note = chemically synthesized
  source 1..20: mol_type = other DNA
caaacaattaacctgctctt

SEQ ID NO: 48065 - DNA, 20 bp, synthetic construct
  misc_feature 1..20: note = chemically synthesized
  source 1..20: mol_type = other DNA
aacctgctcttcagttacat

SEQ ID NO: 48066 - DNA, 20 bp, synthetic construct
  misc_feature 1..20: note = chemically synthesized
  source 1..20: mol_type = other DNA
cagttacattggaatgtgtt

SEQ ID NO: 48067 - DNA, 20 bp, synthetic construct
  misc_feature 1..20: note = chemically synthesized
  source 1..20: mol_type = other DNA
agatttattttttcaaatgt

SEQ ID NO: 48068 - DNA, 20 bp, synthetic construct
  misc_feature 1..20: note = chemically synthesized
  source 1..20: mol_type = other DNA
ttttttcaaatgttggaaca

SEQ ID NO: 48069 - DNA, 20 bp, synthetic construct
  misc_feature 1..20: note = chemically synthesized
  source 1..20: mol_type = other DNA
atgttggaacaaagatgaaa

SEQ ID NO: 48070 - DNA, 20 bp, synthetic construct
  misc_feature 1..20: note = chemically synthesized
  source 1..20: mol_type = other DNA
tggaacaaagatgaaaaagt

SEQ ID NO: 48071 - DNA, 20 bp, synthetic construct
  misc_feature 1..20: note = chemically synthesized
  source 1..20: mol_type = other DNA
aacaaagatgaaaaagtgag

SEQ ID NO: 48072 - DNA, 20 bp, synthetic construct
  misc_feature 1..20: note = chemically synthesized
  source 1..20: mol_type = other DNA
caaagatgaaaaagtgagaa

SEQ ID NO: 48073 - DNA, 20 bp, synthetic construct
  misc_feature 1..20: note = chemically synthesized
  source 1..20: mol_type = other DNA
tgaaaaagtgagaagagccc

SEQ ID NO: 48074 - DNA, 20 bp, synthetic construct
  misc_feature 1..20: note = chemically synthesized
  source 1..20: mol_type = other DNA
aagagccctagattttttct

SEQ ID NO: 48075 - DNA, 20 bp, synthetic construct
  misc_feature 1..20: note = chemically synthesized
  source 1..20: mol_type = other DNA
tagattttttcttggaaatc

SEQ ID NO: 48076 - DNA, 20 bp, synthetic construct
  misc_feature 1..20: note = chemically synthesized
  source 1..20: mol_type = other DNA
ttggaaatctggcttaaatc

SEQ ID NO: 48077 - DNA, 20 bp, synthetic construct
  misc_feature 1..20: note = chemically synthesized
  source 1..20: mol_type = other DNA
tggaaatctggcttaaatcc

SEQ ID NO: 48078 - DNA, 20 bp, synthetic construct
  misc_feature 1..20: note = chemically synthesized
  source 1..20: mol_type = other DNA
gtttctttatttccttgatt

SEQ ID NO: 48079 - DNA, 20 bp, synthetic construct
  misc_feature 1..20: note = chemically synthesized
  source 1..20: mol_type = other DNA
tttctttatttccttgattt

SEQ ID NO: 48080 - DNA, 20 bp, synthetic construct
  misc_feature 1..20: note = chemically synthesized
  source 1..20: mol_type = other DNA
atttccttgatttgggaatt

SEQ ID NO: 48081 - DNA, 20 bp, synthetic construct
  misc_feature 1..20: note = chemically synthesized
  source 1..20: mol_type = other DNA
tgatttgggaatttggtcac

SEQ ID NO: 48082 - DNA, 20 bp, synthetic construct
  misc_feature 1..20: note = chemically synthesized
  source 1..20: mol_type = other DNA
acaaataacatgattttcct

SEQ ID NO: 48083 - DNA, 20 bp, synthetic construct
  misc_feature 1..20: note = chemically synthesized
  source 1..20: mol_type = other DNA
taacatgattttcctaagtc

SEQ ID NO: 48084 - DNA, 20 bp, synthetic construct
  misc_feature 1..20: note = chemically synthesized
  source 1..20: mol_type = other DNA
agatttctttgtttataaaa

SEQ ID NO: 48085 - DNA, 20 bp, synthetic construct
  misc_feature 1..20: note = chemically synthesized
  source 1..20: mol_type = other DNA
gatttctttgtttataaaat

SEQ ID NO: 48086 - DNA, 20 bp, synthetic construct
  misc_feature 1..20: note = chemically synthesized
  source 1..20: mol_type = other DNA
atttctttgtttataaaatg

SEQ ID NO: 48087 - DNA, 20 bp, synthetic construct
  misc_feature 1..20: note = chemically synthesized
  source 1..20: mol_type = other DNA
tgctaccctacctataccat

SEQ ID NO: 48088 - DNA, 20 bp, synthetic construct
  misc_feature 1..20: note = chemically synthesized
  source 1..20: mol_type = other DNA
acctataccatgagctaaat

SEQ ID NO: 48089 - DNA, 20 bp, synthetic construct
  misc_feature 1..20: note = chemically synthesized
  source 1..20: mol_type = other DNA
ataccatgagctaaataagc

SEQ ID NO: 48090 - DNA, 20 bp, synthetic construct
  misc_feature 1..20: note = chemically synthesized
  source 1..20: mol_type = other DNA
taaataagctagtatttgta

SEQ ID NO: 48091 - DNA, 20 bp, synthetic construct
  misc_feature 1..20: note = chemically synthesized
  source 1..20: mol_type = other DNA
aaataagctagtatttgtaa

SEQ ID NO: 48092 - DNA, 20 bp, synthetic construct
  misc_feature 1..20: note = chemically synthesized
  source 1..20: mol_type = other DNA
cttacattcacaatcacaca

SEQ ID NO: 48093 - DNA, 20 bp, synthetic construct
  misc_feature 1..20: note = chemically synthesized
  source 1..20: mol_type = other DNA
tgtatgtatgtataaaaatg

SEQ ID NO: 48094 - DNA, 20 bp, synthetic construct
  misc_feature 1..20: note = chemically synthesized
  source 1..20: mol_type = other DNA
gtatgtatgtataaaaatgt

SEQ ID NO: 48095 - DNA, 20 bp, synthetic construct
  misc_feature 1..20: note = chemically synthesized
  source 1..20: mol_type = other DNA
tatgtatgtataaaaatgtg

SEQ ID NO: 48096 - DNA, 20 bp, synthetic construct
  misc_feature 1..20: note = chemically synthesized
  source 1..20: mol_type = other DNA
acccactcaacaaataccct

SEQ ID NO: 48097 - DNA, 20 bp, synthetic construct
  misc_feature 1..20: note = chemically synthesized
  source 1..20: mol_type = other DNA
cattatatgcgtatatcatc

SEQ ID NO: 48098 - DNA, 20 bp, synthetic construct
  misc_feature 1..20: note = chemically synthesized
  source 1..20: mol_type = other DNA
tgcgtatatcatctggcaaa

SEQ ID NO: 48099 - DNA, 20 bp, synthetic construct
  misc_feature 1..20: note = chemically synthesized
  source 1..20: mol_type = other DNA
atggatgtgtataatttctc

SEQ ID NO: 48100 - DNA, 20 bp, synthetic construct
  misc_feature 1..20: note = chemically synthesized
  source 1..20: mol_type = other DNA
tggatgtgtataatttctcc

SEQ ID NO: 48101 - DNA, 20 bp, synthetic construct
  misc_feature 1..20: note = chemically synthesized
  source 1..20: mol_type = other DNA
ggatgtgtataatttctcca

SEQ ID NO: 48102 - DNA, 20 bp, synthetic construct
  misc_feature 1..20: note = chemically synthesized
  source 1..20: mol_type = other DNA
tgtataatttctccagggat

SEQ ID NO: 48103 - DNA, 20 bp, synthetic construct
  misc_feature 1..20: note = chemically synthesized
  source 1..20: mol_type = other DNA
ataatttctccagggataag

SEQ ID NO: 48104 - DNA, 20 bp, synthetic construct
  misc_feature 1..20: note = chemically synthesized
  source 1..20: mol_type = other DNA
aagaagcaaatgtataccga

SEQ ID NO: 48105 - DNA, 20 bp, synthetic construct
  misc_feature 1..20: note = chemically synthesized
  source 1..20: mol_type = other DNA
agcaaatgtataccgatgga

SEQ ID NO: 48106 - DNA, 20 bp, synthetic construct
  misc_feature 1..20: note = chemically synthesized
  source 1..20: mol_type = other DNA
taccgatggaaagccttact

SEQ ID NO: 48107 - DNA, 20 bp, synthetic construct
  misc_feature 1..20: note = chemically synthesized
  source 1..20: mol_type = other DNA
accgatggaaagccttactc

SEQ ID NO: 48108 - DNA, 20 bp, synthetic construct
  misc_feature 1..20: note = chemically synthesized
  source 1..20: mol_type = other DNA
gccttactcaggccataaca

SEQ ID NO: 48109 - DNA, 20 bp, synthetic construct
  misc_feature 1..20: note = chemically synthesized
  source 1..20: mol_type = other DNA
cttactcaggccataacaaa

SEQ ID NO: 48110 - DNA, 20 bp, synthetic construct
  misc_feature 1..20: note = chemically synthesized
  source 1..20: mol_type = other DNA
tactcaggccataacaaaga

SEQ ID NO: 48111 - DNA, 20 bp, synthetic construct
  misc_feature 1..20: note = chemically synthesized
  source 1..20: mol_type = other DNA
ataacaaagagagaaatgct

SEQ ID NO: 48112 - DNA, 20 bp, synthetic construct
  misc_feature 1..20: note = chemically synthesized
  source 1..20: mol_type = other DNA
gctgagtcccactccatgaa

SEQ ID NO: 48113 - DNA, 20 bp, synthetic construct
  misc_feature 1..20: note = chemically synthesized
  source 1..20: mol_type = other DNA
ctgagtcccactccatgaac

SEQ ID NO: 48114 - DNA, 20 bp, synthetic construct
  misc_feature 1..20: note = chemically synthesized
  source 1..20: mol_type = other DNA
tcccactccatgaacaggtc

SEQ ID NO: 48115 - DNA, 20 bp, synthetic construct
  misc_feature 1..20: note = chemically synthesized
  source 1..20: mol_type = other DNA
cccactccatgaacaggtca

SEQ ID NO: 48116 - DNA, 20 bp, synthetic construct
  misc_feature 1..20: note = chemically synthesized
  source 1..20: mol_type = other DNA
caaggaaccaaacatattca

SEQ ID NO: 48117 - DNA, 20 bp, synthetic construct
  misc_feature 1..20: note = chemically synthesized
  source 1..20: mol_type = other DNA
aggaaccaaacatattcaaa

SEQ ID NO: 48118 - DNA, 20 bp, synthetic construct
  misc_feature 1..20: note = chemically synthesized
  source 1..20: mol_type = other DNA
atttcattgtttcaacttgc

SEQ ID NO: 48119 - DNA, 20 bp, synthetic construct
  misc_feature 1..20: note = chemically synthesized
  source 1..20: mol_type = other DNA
cattgtttcaacttgctagt

SEQ ID NO: 48120 - DNA, 20 bp, synthetic construct
  misc_feature 1..20: note = chemically synthesized
  source 1..20: mol_type = other DNA
attgtttcaacttgctagtg

SEQ ID NO: 48121 - DNA, 20 bp, synthetic construct
  misc_feature 1..20: note = chemically synthesized
  source 1..20: mol_type = other DNA
ttgtttcaacttgctagtga

SEQ ID NO: 48122 - DNA, 20 bp, synthetic construct
  misc_feature 1..20: note = chemically synthesized
  source 1..20: mol_type = other DNA
tgtttcaacttgctagtgag

SEQ ID NO: 48123 - DNA, 20 bp, synthetic construct
  misc_feature 1..20: note = chemically synthesized
  source 1..20: mol_type = other DNA
tttcaacttgctagtgaggg

SEQ ID NO: 48124 - DNA, 20 bp, synthetic construct
  misc_feature 1..20: note = chemically synthesized
  source 1..20: mol_type = other DNA
acttgctagtgaggggagca

SEQ ID NO: 48125 - DNA, 20 bp, synthetic construct
  misc_feature 1..20: note = chemically synthesized
  source 1..20: mol_type = other DNA
aggggagcatggcacctgaa

SEQ ID NO: 48126 - DNA, 20 bp, synthetic construct
  misc_feature 1..20: note = chemically synthesized
  source 1..20: mol_type = other DNA
gggagcatggcacctgaaca

SEQ ID NO: 48127 - DNA, 20 bp, synthetic construct
  misc_feature 1..20: note = chemically synthesized
  source 1..20: mol_type = other DNA
tgatataaattaatgaaact

SEQ ID NO: 48128 - DNA, 20 bp, synthetic construct
  misc_feature 1..20: note = chemically synthesized
  source 1..20: mol_type = other DNA
aattaatgaaactgagaacc

SEQ ID NO: 48129 - DNA, 20 bp, synthetic construct
  misc_feature 1..20: note = chemically synthesized
  source 1..20: mol_type = other DNA
atgaaactgagaaccaagcg

SEQ ID NO: 48130 - DNA, 20 bp, synthetic construct
  misc_feature 1..20: note = chemically synthesized
  source 1..20: mol_type = other DNA
gaaactgagaaccaagcgaa

SEQ ID NO: 48131 - DNA, 20 bp, synthetic construct
  misc_feature 1..20: note = chemically synthesized
  source 1..20: mol_type = other DNA
tgagaaccaagcgaagagct

SEQ ID NO: 48132 - DNA, 20 bp, synthetic construct
  misc_feature 1..20: note = chemically synthesized
  source 1..20: mol_type = other DNA
gagcttagccatcctttgca

SEQ ID NO: 48133 - DNA, 20 bp, synthetic construct
  misc_feature 1..20: note = chemically synthesized
  source 1..20: mol_type = other DNA
ttagccatcctttgcatagt

SEQ ID NO: 48134 - DNA, 20 bp, synthetic construct
  misc_feature 1..20: note = chemically synthesized
  source 1..20: mol_type = other DNA
ctttgcatagttagctacaa

SEQ ID NO: 48135 - DNA, 20 bp, synthetic construct
  misc_feature 1..20: note = chemically synthesized
  source 1..20: mol_type = other DNA
tacaatggctatttattttt

SEQ ID NO: 48136 - DNA, 20 bp, synthetic construct
  misc_feature 1..20: note = chemically synthesized
  source 1..20: mol_type = other DNA
atggctatttatttttcagc

SEQ ID NO: 48137 - DNA, 20 bp, synthetic construct
  misc_feature 1..20: note = chemically synthesized
  source 1..20: mol_type = other DNA
tatttatttttcagccagac

SEQ ID NO: 48138 - DNA, 20 bp, synthetic construct
  misc_feature 1..20: note = chemically synthesized
  source 1..20: mol_type = other DNA
cagccagactggccatcatg

SEQ ID NO: 48139 - DNA, 20 bp, synthetic construct
  misc_feature 1..20: note = chemically synthesized
  source 1..20: mol_type = other DNA
agccagactggccatcatgt

SEQ ID NO: 48140 - DNA, 20 bp, synthetic construct
  misc_feature 1..20: note = chemically synthesized
  source 1..20: mol_type = other DNA
atcatgtaggcacactcttt

SEQ ID NO: 48141 - DNA, 20 bp, synthetic construct
  misc_feature 1..20: note = chemically synthesized
  source 1..20: mol_type = other DNA
gtaggcacactcttttagat

SEQ ID NO: 48142 - DNA, 20 bp, synthetic construct
  misc_feature 1..20: note = chemically synthesized
  source 1..20: mol_type = other DNA
ttttttctgcccattcattc

SEQ ID NO: 48143 - DNA, 20 bp, synthetic construct
  misc_feature 1..20: note = chemically synthesized
  source 1..20: mol_type = other DNA
cattcattccagcaccgtga

SEQ ID NO: 48144 - DNA, 20 bp, synthetic construct
  misc_feature 1..20: note = chemically synthesized
  source 1..20: mol_type = other DNA
cagcaccgtgacagtcttca

SEQ ID NO: 48145 - DNA, 20 bp, synthetic construct
  misc_feature 1..20: note = chemically synthesized
  source 1..20: mol_type = other DNA
agcaccgtgacagtcttcac

SEQ ID NO: 48146 - DNA, 20 bp, synthetic construct
  misc_feature 1..20: note = chemically synthesized
  source 1..20: mol_type = other DNA
gcaccgtgacagtcttcacg

SEQ ID NO: 48147 - DNA, 20 bp, synthetic construct
  misc_feature 1..20: note = chemically synthesized
  source 1..20: mol_type = other DNA
gaaattaaacttattttttt

SEQ ID NO: 48148 - DNA, 20 bp, synthetic construct
  misc_feature 1..20: note = chemically synthesized
  source 1..20: mol_type = other DNA
agaatttttcaatcatatac

SEQ ID NO: 48149 - DNA, 20 bp, synthetic construct
  misc_feature 1..20: note = chemically synthesized
  source 1..20: mol_type = other DNA
tcatatacaagattttgaac

SEQ ID NO: 48150 - DNA, 20 bp, synthetic construct
  misc_feature 1..20: note = chemically synthesized
  source 1..20: mol_type = other DNA
catatacaagattttgaact

SEQ ID NO: 48151 - DNA, 20 bp, synthetic construct
  misc_feature 1..20: note = chemically synthesized
  source 1..20: mol_type = other DNA
aattaaatgaattgcacata

SEQ ID NO: 48152 - DNA, 20 bp, synthetic construct
  misc_feature 1..20: note = chemically synthesized
  source 1..20: mol_type = other DNA
atgaattgcacataaagcca

SEQ ID NO: 48153 - DNA, 20 bp, synthetic construct
  misc_feature 1..20: note = chemically synthesized
  source 1..20: mol_type = other DNA
tatgtatttttactacattg

SEQ ID NO: 48154 - DNA, 20 bp, synthetic construct
  misc_feature 1..20: note = chemically synthesized
  source 1..20: mol_type = other DNA
atgtatttttactacattgt

SEQ ID NO: 48155 - DNA, 20 bp, synthetic construct
  misc_feature 1..20: note = chemically synthesized
  source 1..20: mol_type = other DNA
gtatttttactacattgtgg

SEQ ID NO: 48156 - DNA, 20 bp, synthetic construct
  misc_feature 1..20: note = chemically synthesized
  source 1..20: mol_type = other DNA
aactatgtcttacctgattt

SEQ ID NO: 48157 - DNA, 20 bp, synthetic construct
  misc_feature 1..20: note = chemically synthesized
  source 1..20: mol_type = other DNA
ttacctgatttcagaaataa

SEQ ID NO: 48158 - DNA, 20 bp, synthetic construct
  misc_feature 1..20: note = chemically synthesized
  source 1..20: mol_type = other DNA
cctgatttcagaaataaaag

SEQ ID NO: 48159 - DNA, 20 bp, synthetic construct
  misc_feature 1..20: note = chemically synthesized
  source 1..20: mol_type = other DNA
gatttcagaaataaaagaag

SEQ ID NO: 48160 - DNA, 20 bp, synthetic construct
  misc_feature 1..20: note = chemically synthesized
  source 1..20: mol_type = other DNA
ttcagaaataaaagaagtag

SEQ ID NO: 48161 - DNA, 20 bp, synthetic construct
  misc_feature 1..20: note = chemically synthesized
  source 1..20: mol_type = other DNA
cacttccttatgttccattt

SEQ ID NO: 48162 - DNA, 20 bp, synthetic construct
  misc_feature 1..20: note = chemically synthesized
  source 1..20: mol_type = other DNA
acttccttatgttccatttt

SEQ ID NO: 48163 - DNA, 20 bp, synthetic construct
  misc_feature 1..20: note = chemically synthesized
  source 1..20: mol_type = other DNA
cttatgttccattttgggac

SEQ ID NO: 48164 - DNA, 20 bp, synthetic construct
  misc_feature 1..20: note = chemically synthesized
  source 1..20: mol_type = other DNA
tgttccattttgggactggc

SEQ ID NO: 48165 - DNA, 20 bp, synthetic construct
  misc_feature 1..20: note = chemically synthesized
  source 1..20: mol_type = other DNA
tccattttgggactggccag

SEQ ID NO: 48166 - DNA, 20 bp, synthetic construct
  misc_feature 1..20: note = chemically synthesized
  source 1..20: mol_type = other DNA
tgggactggccagcagtgcc

SEQ ID NO: 48167 - DNA, 20 bp, synthetic construct
  misc_feature 1..20: note = chemically synthesized
  source 1..20: mol_type = other DNA
actggccagcagtgcccaga

SEQ ID NO: 48168 - DNA, 20 bp, synthetic construct
  misc_feature 1..20: note = chemically synthesized
  source 1..20: mol_type = other DNA
cagaaagtgtgtcccaatcc

SEQ ID NO: 48169 - DNA, 20 bp, synthetic construct
  misc_feature 1..20: note = chemically synthesized
  source 1..20: mol_type = other DNA
agaaagtgtgtcccaatccc

SEQ ID NO: 48170 - DNA, 20 bp, synthetic construct
  misc_feature 1..20: note = chemically synthesized
  source 1..20: mol_type = other DNA
aggacattgttgacttacat

SEQ ID NO: 48171 - DNA, 20 bp, synthetic construct
  misc_feature 1..20: note = chemically synthesized
  source 1..20: mol_type = other DNA
gacattgttgacttacatga

SEQ ID NO: 48172 - DNA, 20 bp, synthetic construct
  misc_feature 1..20: note = chemically synthesized
  source 1..20: mol_type = other DNA
gagtaaacgcacccacaaac

SEQ ID NO: 48173 - DNA, 20 bp, synthetic construct
  misc_feature 1..20: note = chemically synthesized
  source 1..20: mol_type = other DNA
aaacgcacccacaaaccaga

SEQ ID NO: 48174 - DNA, 20 bp, synthetic construct
  misc_feature 1..20: note = chemically synthesized
  source 1..20: mol_type = other DNA
acaaaccagatagtcaaatt

SEQ ID NO: 48175 - DNA, 20 bp, synthetic construct
  misc_feature 1..20: note = chemically synthesized
  source 1..20: mol_type = other DNA
aattaagttaatgattctct

SEQ ID NO: 48176 - DNA, 20 bp, synthetic construct
  misc_feature 1..20: note = chemically synthesized
  source 1..20: mol_type = other DNA
ttaagttaatgattctctca

SEQ ID NO: 48177 - DNA, 20 bp, synthetic construct
  misc_feature 1..20: note = chemically synthesized
  source 1..20: mol_type = other DNA
ctctcagagacccatgccac

SEQ ID NO: 48178 - DNA, 20 bp, synthetic construct
  misc_feature 1..20: note = chemically synthesized
  source 1..20: mol_type = other DNA
agagacccatgccactggct

SEQ ID NO: 48179 - DNA, 20 bp, synthetic construct
  misc_feature 1..20: note = chemically synthesized
  source 1..20: mol_type = other DNA
gacccatgccactggctcag

SEQ ID NO: 48180 - DNA, 20 bp, synthetic construct
  misc_feature 1..20: note = chemically synthesized
  source 1..20: mol_type = other DNA
acccatgccactggctcagc

SEQ ID NO: 48181 - DNA, 20 bp, synthetic construct
  misc_feature 1..20: note = chemically synthesized
  source 1..20: mol_type = other DNA
cccatgccactggctcagca

SEQ ID NO: 48182 - DNA, 20 bp, synthetic construct
  misc_feature 1..20: note = chemically synthesized
  source 1..20: mol_type = other DNA
ttcaaacattaccttgaata

SEQ ID NO: 48183 - DNA, 20 bp, synthetic construct
  misc_feature 1..20: note = chemically synthesized
  source 1..20: mol_type = other DNA
caaacattaccttgaatata

SEQ ID NO: 48184 - DNA, 20 bp, synthetic construct
  misc_feature 1..20: note = chemically synthesized
  source 1..20: mol_type = other DNA
tagagtcttataaaatattt

SEQ ID NO: 48185 - DNA, 20 bp, synthetic construct
  misc_feature 1..20: note = chemically synthesized
  source 1..20: mol_type = other DNA
gagtcttataaaatatttga

SEQ ID NO: 48186 - DNA, 20 bp, synthetic construct
  misc_feature 1..20: note = chemically synthesized
  source 1..20: mol_type = other DNA
atttgagagtgcaatgtcaa

SEQ ID NO: 48187 - DNA, 20 bp, synthetic construct
  misc_feature 1..20: note = chemically synthesized
  source 1..20: mol_type = other DNA
agtgcaatgtcaatagatgc

SEQ ID NO: 48188 - DNA, 20 bp, synthetic construct
  misc_feature 1..20: note = chemically synthesized
  source 1..20: mol_type = other DNA
gtgcaatgtcaatagatgct

SEQ ID NO: 48189 - DNA, 20 bp, synthetic construct
  misc_feature 1..20: note = chemically synthesized
  source 1..20: mol_type = other DNA
caatgtcaatagatgctggg

SEQ ID NO: 48190 - DNA, 20 bp, synthetic construct
  misc_feature 1..20: note = chemically synthesized
  source 1..20: mol_type = other DNA
tgtcaatagatgctgggaag

SEQ ID NO: 48191 - DNA, 20 bp, synthetic construct
  misc_feature 1..20: note = chemically synthesized
  source 1..20: mol_type = other DNA
tagatgctgggaagtggtga

SEQ ID NO: 48192 - DNA, 20 bp, synthetic construct
  misc_feature 1..20: note = chemically synthesized
  source 1..20: mol_type = other DNA
gtgaaagccatttcccccct

SEQ ID NO: 48193 - DNA, 20 bp, synthetic construct
  misc_feature 1..20: note = chemically synthesized
  source 1..20: mol_type = other DNA
cttactccttccctcacccc

SEQ ID NO: 48194 - DNA, 20 bp, synthetic construct
  misc_feature 1..20: note = chemically synthesized
  source 1..20: mol_type = other DNA
agaccttcatctttcctgat

SEQ ID NO: 48195 - DNA, 20 bp, synthetic construct
  misc_feature 1..20: note = chemically synthesized
  source 1..20: mol_type = other DNA
ttctttcattctctttcttt

SEQ ID NO: 48196 - DNA, 20 bp, synthetic construct
  misc_feature 1..20: note = chemically synthesized
  source 1..20: mol_type = other DNA
tggataaaataaaatcataa

SEQ ID NO: 48197 - DNA, 20 bp, synthetic construct
  misc_feature 1..20: note = chemically synthesized
  source 1..20: mol_type = other DNA
ataaaataaaatcataaaag

SEQ ID NO: 48198 - DNA, 20 bp, synthetic construct
  misc_feature 1..20: note = chemically synthesized
  source 1..20: mol_type = other DNA
taaaagtagctcatatttgc

SEQ ID NO: 48199 - DNA, 20 bp, synthetic construct
  misc_feature 1..20: note = chemically synthesized
  source 1..20: mol_type = other DNA
ttgctggtaacttccatgac

SEQ ID NO: 48200 - DNA, 20 bp, synthetic construct
  misc_feature 1..20: note = chemically synthesized
  source 1..20: mol_type = other DNA
ccatgaccagaccctctgcc

SEQ ID NO: 48201 - DNA, 20 bp, synthetic construct
  misc_feature 1..20: note = chemically synthesized
  source 1..20: mol_type = other DNA
tgccaagtgctgcacatcca

SEQ ID NO: 48202 - DNA, 20 bp, synthetic construct
  misc_feature 1..20: note = chemically synthesized
  source 1..20: mol_type = other DNA
gcacatccatagcctccctc

SEQ ID NO: 48203 - DNA, 20 bp, synthetic construct
  misc_feature 1..20: note = chemically synthesized
  source 1..20: mol_type = other DNA
gcctccctcaagctttccaa

SEQ ID NO: 48204 - DNA, 20 bp, synthetic construct
  misc_feature 1..20: note = chemically synthesized
  source 1..20: mol_type = other DNA
cctccctcaagctttccaac

SEQ ID NO: 48205 - DNA, 20 bp, synthetic construct
  misc_feature 1..20: note = chemically synthesized
  source 1..20: mol_type = other DNA
ccctcaagctttccaacagg

SEQ ID NO: 48206 - DNA, 20 bp, synthetic construct
  misc_feature 1..20: note = chemically synthesized
  source 1..20: mol_type = other DNA
tccaacaggcagtgctgtac

SEQ ID NO: 48207 - DNA, 20 bp, synthetic construct
  misc_feature 1..20: note = chemically synthesized
  source 1..20: mol_type = other DNA
ccaacaggcagtgctgtacg

SEQ ID NO: 48208 - DNA, 20 bp, synthetic construct
  misc_feature 1..20: note = chemically synthesized
  source 1..20: mol_type = other DNA
aacaggcagtgctgtacgag

SEQ ID NO: 48209 - DNA, 20 bp, synthetic construct
  misc_feature 1..20: note = chemically synthesized
  source 1..20: mol_type = other DNA
acaggcagtgctgtacgagg

SEQ ID NO: 48210 - DNA, 20 bp, synthetic construct
  misc_feature 1..20: note = chemically synthesized
  source 1..20: mol_type = other DNA
caggcagtgctgtacgagga

SEQ ID NO: 48211 - DNA, 20 bp, synthetic construct
  misc_feature 1..20: note = chemically synthesized
  source 1..20: mol_type = other DNA
aggcagtgctgtacgaggag

SEQ ID NO: 48212 - DNA, 20 bp, synthetic construct
  misc_feature 1..20: note = chemically synthesized
  source 1..20: mol_type = other DNA
ggcagtgctgtacgaggagg

SEQ ID NO: 48213 - DNA, 20 bp, synthetic construct
  misc_feature 1..20: note = chemically synthesized
  source 1..20: mol_type = other DNA
tgctgtacgaggagggggct

SEQ ID NO: 48214 - DNA, 20 bp, synthetic construct
  misc_feature 1..20: note = chemically synthesized
  source 1..20: mol_type = other DNA
gctgtacgaggagggggctg

SEQ ID NO: 48215 - DNA, 20 bp, synthetic construct
  misc_feature 1..20: note = chemically synthesized
  source 1..20: mol_type = other DNA
gagggggctgaggccttccc

SEQ ID NO: 48216 - DNA, 20 bp, synthetic construct
  misc_feature 1..20: note = chemically synthesized
  source 1..20: mol_type = other DNA
agggggctgaggccttcccg

SEQ ID NO: 48217 - DNA, 20 bp, synthetic construct
  misc_feature 1..20: note = chemically synthesized
  source 1..20: mol_type = other DNA
cccgaggttgtgtcgctacc

SEQ ID NO: 48218 - DNA, 20 bp, synthetic construct
  misc_feature 1..20: note = chemically synthesized
  source 1..20: mol_type = other DNA
ccgaggttgtgtcgctaccc

SEQ ID NO: 48219 - DNA, 20 bp, synthetic construct
  misc_feature 1..20: note = chemically synthesized
  source 1..20: mol_type = other DNA
cgaggttgtgtcgctaccca

SEQ ID NO: 48220 - DNA, 20 bp, synthetic construct
  misc_feature 1..20: note = chemically synthesized
  source 1..20: mol_type = other DNA
gaggttgtgtcgctacccag

SEQ ID NO: 48221 - DNA, 20 bp, synthetic construct
  misc_feature 1..20: note = chemically synthesized
  source 1..20: mol_type = other DNA
tgtgtcgctacccaggggtg

SEQ ID NO: 48222 - DNA, 20 bp, synthetic construct
  misc_feature 1..20: note = chemically synthesized
  source 1..20: mol_type = other DNA
ctacccaggggtgcagctga

SEQ ID NO: 48223 - DNA, 20 bp, synthetic construct
  misc_feature 1..20: note = chemically synthesized
  source 1..20: mol_type = other DNA
gctgatagacacaacccttt

SEQ ID NO: 48224 - DNA, 20 bp, synthetic construct
  misc_feature 1..20: note = chemically synthesized
  source 1..20: mol_type = other DNA
ctgatagacacaaccctttc

SEQ ID NO: 48225 - DNA, 20 bp, synthetic construct
  misc_feature 1..20: note = chemically synthesized
  source 1..20: mol_type = other DNA
gacacaaccctttcaggtct

SEQ ID NO: 48226 - DNA, 20 bp, synthetic construct
  misc_feature 1..20: note = chemically synthesized
  source 1..20: mol_type = other DNA
cctttcaggtcttagtttac

SEQ ID NO: 48227 - DNA, 20 bp, synthetic construct
  misc_feature 1..20: note = chemically synthesized
  source 1..20: mol_type = other DNA
tcaggtcttagtttacgagc

SEQ ID NO: 48228 - DNA, 20 bp, synthetic construct
  misc_feature 1..20: note = chemically synthesized
  source 1..20: mol_type = other DNA
gtcttagtttacgagcaagc

SEQ ID NO: 48229 - DNA, 20 bp, synthetic construct
  misc_feature 1..20: note = chemically synthesized
  source 1..20: mol_type = other DNA
tcttagtttacgagcaagct

SEQ ID NO: 48230 - DNA, 20 bp, synthetic construct
  misc_feature 1..20: note = chemically synthesized
  source 1..20: mol_type = other DNA
ctgtgccgaaatgacaacat

SEQ ID NO: 48231 - DNA, 20 bp, synthetic construct
  misc_feature 1..20: note = chemically synthesized
  source 1..20: mol_type = other DNA
cttcaaaatttatttattcc

SEQ ID NO: 48232 - DNA, 20 bp, synthetic construct
  misc_feature 1..20: note = chemically synthesized
  source 1..20: mol_type = other DNA
gtaattataaattatgttat

SEQ ID NO: 48233 - DNA, 20 bp, synthetic construct
  misc_feature 1..20: note = chemically synthesized
  source 1..20: mol_type = other DNA
ttataagatatcaatccttc

SEQ ID NO: 48234 - DNA, 20 bp, synthetic construct
  misc_feature 1..20: note = chemically synthesized
  source 1..20: mol_type = other DNA
tataagatatcaatccttcc

SEQ ID NO: 48235 - DNA, 20 bp, synthetic construct
  misc_feature 1..20: note = chemically synthesized
  source 1..20: mol_type = other DNA
taagatatcaatccttccag

SEQ ID NO: 48236 - DNA, 20 bp, synthetic construct
  misc_feature 1..20: note = chemically synthesized
  source 1..20: mol_type = other DNA
aagatatcaatccttccagg

SEQ ID NO: 48237 - DNA, 20 bp, synthetic construct
  misc_feature 1..20: note = chemically synthesized
  source 1..20: mol_type = other DNA
agatatcaatccttccagga

SEQ ID NO: 48238 - DNA, 20 bp, synthetic construct
  misc_feature 1..20: note = chemically synthesized
  source 1..20: mol_type = other DNA
gatatcaatccttccaggag

SEQ ID NO: 48239 - DNA, 20 bp, synthetic construct
  misc_feature 1..20: note = chemically synthesized
  source 1..20: mol_type = other DNA
atatcaatccttccaggagg

SEQ ID NO: 48240 - DNA, 20 bp, synthetic construct
  misc_feature 1..20: note = chemically synthesized
  source 1..20: mol_type = other DNA
tcaatccttccaggaggggg

SEQ ID NO: 48241 - DNA, 20 bp, synthetic construct
  misc_feature 1..20: note = chemically synthesized
  source 1..20: mol_type = other DNA
atccttccaggagggggtgg

SEQ ID NO: 48242 - DNA, 20 bp, synthetic construct
  misc_feature 1..20: note = chemically synthesized
  source 1..20: mol_type = other DNA
gtggctcatgcctataatcc

SEQ ID NO: 48243 - DNA, 20 bp, synthetic construct
  misc_feature 1..20: note = chemically synthesized
  source 1..20: mol_type = other DNA
tgcctataatcccagcattt

SEQ ID NO: 48244 - DNA, 20 bp, synthetic construct
  misc_feature 1..20: note = chemically synthesized
  source 1..20: mol_type = other DNA
gcctataatcccagcatttt

SEQ ID NO: 48245 - DNA, 20 bp, synthetic construct
  misc_feature 1..20: note = chemically synthesized
  source 1..20: mol_type = other DNA
ctataatcccagcattttgg

SEQ ID NO: 48246 - DNA, 20 bp, synthetic construct
  misc_feature 1..20: note = chemically synthesized
  source 1..20: mol_type = other DNA
tataatcccagcattttggg

SEQ ID NO: 48247 - DNA, 20 bp, synthetic construct
  misc_feature 1..20: note = chemically synthesized
  source 1..20: mol_type = other DNA
cccagcattttgggaggcca

SEQ ID NO: 48248 - DNA, 20 bp, synthetic construct
  misc_feature 1..20: note = chemically synthesized
  source 1..20: mol_type = other DNA
agcattttgggaggccacgg

SEQ ID NO: 48249 - DNA, 20 bp, synthetic construct
  misc_feature 1..20: note = chemically synthesized
  source 1..20: mol_type = other DNA
ttttgggaggccacggcaga

SEQ ID NO: 48250 - DNA, 20 bp, synthetic construct
  misc_feature 1..20: note = chemically synthesized
  source 1..20: mol_type = other DNA
ccacggcagatggatcacct

SEQ ID NO: 48251 - DNA, 20 bp, synthetic construct
  misc_feature 1..20: note = chemically synthesized
  source 1..20: mol_type = other DNA
cacggcagatggatcacctg

SEQ ID NO: 48252 - DNA, 20 bp, synthetic construct
  misc_feature 1..20: note = chemically synthesized
  source 1..20: mol_type = other DNA
gcagatggatcacctgaggc

SEQ ID NO: 48253 - DNA, 20 bp, synthetic construct
  misc_feature 1..20: note = chemically synthesized
  source 1..20: mol_type = other DNA
cagatggatcacctgaggcc

SEQ ID NO: 48254 - DNA, 20 bp, synthetic construct
  misc_feature 1..20: note = chemically synthesized
  source 1..20: mol_type = other DNA
gatggatcacctgaggccag

SEQ ID NO: 48255 - DNA, 20 bp, synthetic construct
  misc_feature 1..20: note = chemically synthesized
  source 1..20: mol_type = other DNA
tcacctgaggccaggagttt

SEQ ID NO: 48256 - DNA, 20 bp, synthetic construct
  misc_feature 1..20: note = chemically synthesized
  source 1..20: mol_type = other DNA
tgaggccaggagtttgagac

SEQ ID NO: 48257 - DNA, 20 bp, synthetic construct
  misc_feature 1..20: note = chemically synthesized
  source 1..20: mol_type = other DNA
ccaggagtttgagacaagcc

SEQ ID NO: 48258 - DNA, 20 bp, synthetic construct
  misc_feature 1..20: note = chemically synthesized
  source 1..20: mol_type = other DNA
caggagtttgagacaagcct

SEQ ID NO: 48259 - DNA, 20 bp, synthetic construct
  misc_feature 1..20: note = chemically synthesized
  source 1..20: mol_type = other DNA
tctacaaaaaatacaaaaat

SEQ ID NO: 48260 - DNA, 20 bp, synthetic construct
  misc_feature 1..20: note = chemically synthesized
  source 1..20: mol_type = other DNA
caaaaaatacaaaaattagc

SEQ ID NO: 48261 - DNA, 20 bp, synthetic construct
  misc_feature 1..20: note = chemically synthesized
  source 1..20: mol_type = other DNA
aaaaaatacaaaaattagct

SEQ ID NO: 48262 - DNA, 20 bp, synthetic construct
  misc_feature 1..20: note = chemically synthesized
  source 1..20: mol_type = other DNA
atacaaaaattagctgggtg

SEQ ID NO: 48263 - DNA, 20 bp, synthetic construct
  misc_feature 1..20: note = chemically synthesized
  source 1..20: mol_type = other DNA
acaaaaattagctgggtgtg

SEQ ID NO: 48264 - DNA, 20 bp, synthetic construct
  misc_feature 1..20: note = chemically synthesized
  source 1..20: mol_type = other DNA
caaaaattagctgggtgtgg

SEQ ID NO: 48265 - DNA, 20 bp, synthetic construct
  misc_feature 1..20: note = chemically synthesized
  source 1..20: mol_type = other DNA
ctgggtgtggaggcacatgc

SEQ ID NO: 48266 - DNA, 20 bp, synthetic construct
  misc_feature 1..20: note = chemically synthesized
  source 1..20: mol_type = other DNA
gaggcacatgccagtcatcc

SEQ ID NO: 48267 - DNA, 20 bp, synthetic construct
  misc_feature 1..20: note = chemically synthesized
  source 1..20: mol_type = other DNA
tgccagtcatcccagctact

SEQ ID NO: 48268 - DNA, 20 bp, synthetic construct
  misc_feature 1..20: note = chemically synthesized
  source 1..20: mol_type = other DNA
cagtcatcccagctactaag

SEQ ID NO: 48269 - DNA, 20 bp, synthetic construct
  misc_feature 1..20: note = chemically synthesized
  source 1..20: mol_type = other DNA
agtcatcccagctactaagt

SEQ ID NO: 48270 - DNA, 20 bp, synthetic construct
  misc_feature 1..20: note = chemically synthesized
  source 1..20: mol_type = other DNA
tcccagctactaagtaggct

SEQ ID NO: 48271 - DNA, 20 bp, synthetic construct
  misc_feature 1..20: note = chemically synthesized
  source 1..20: mol_type = other DNA
cccagctactaagtaggctg

SEQ ID NO: 48272 - DNA, 20 bp, synthetic construct
  misc_feature 1..20: note = chemically synthesized
  source 1..20: mol_type = other DNA
tactaagtaggctgaggcac

SEQ ID NO: 48273 - DNA, 20 bp, synthetic construct
  misc_feature 1..20: note = chemically synthesized
  source 1..20: mol_type = other DNA
gcactagaattgcttgaaca

SEQ ID NO: 48274 - DNA, 20 bp, synthetic construct
  misc_feature 1..20: note = chemically synthesized
  source 1..20: mol_type = other DNA
cactagaattgcttgaacac

SEQ ID NO: 48275 - DNA, 20 bp, synthetic construct
  misc_feature 1..20: note = chemically synthesized
  source 1..20: mol_type = other DNA
ctagaattgcttgaacacag

SEQ ID NO: 48276 - DNA, 20 bp, synthetic construct
  misc_feature 1..20: note = chemically synthesized
  source 1..20: mol_type = other DNA
aattgcttgaacacaggaga

SEQ ID NO: 48277 - DNA, 20 bp, synthetic construct
  misc_feature 1..20: note = chemically synthesized
  source 1..20: mol_type = other DNA
ttgcttgaacacaggagatg

SEQ ID NO: 48278 - DNA, 20 bp, synthetic construct
  misc_feature 1..20: note = chemically synthesized
  source 1..20: mol_type = other DNA
tgcttgaacacaggagatgg

SEQ ID NO: 48279 - DNA, 20 bp, synthetic construct
  misc_feature 1..20: note = chemically synthesized
  source 1..20: mol_type = other DNA
aacacaggagatggaggttg

SEQ ID NO: 48280 - DNA, 20 bp, synthetic construct
  misc_feature 1..20: note = chemically synthesized
  source 1..20: mol_type = other DNA
caggagatggaggttgcagt

SEQ ID NO: 48281 - DNA, 20 bp, synthetic construct
  misc_feature 1..20: note = chemically synthesized
  source 1..20: mol_type = other DNA
gatggaggttgcagtgagcc

SEQ ID NO: 48282 - DNA, 20 bp, synthetic construct
  misc_feature 1..20: note = chemically synthesized
  source 1..20: mol_type = other DNA
aagaatgtgccactgcactc

SEQ ID NO: 48283 - DNA, 20 bp, synthetic construct
  misc_feature 1..20: note = chemically synthesized
  source 1..20: mol_type = other DNA
tgtgccactgcactccagcc

SEQ ID NO: 48284 - DNA, 20 bp, synthetic construct
  misc_feature 1..20: note = chemically synthesized
  source 1..20: mol_type = other DNA
gtgccactgcactccagcct

SEQ ID NO: 48285 - DNA, 20 bp, synthetic construct
  misc_feature 1..20: note = chemically synthesized
  source 1..20: mol_type = other DNA
ctgcactccagcctgggtga

SEQ ID NO: 48286 - DNA, 20 bp, synthetic construct
  misc_feature 1..20: note = chemically synthesized
  source 1..20: mol_type = other DNA
gcactccagcctgggtgaca

SEQ ID NO: 48287 - DNA, 20 bp, synthetic construct
  misc_feature 1..20: note = chemically synthesized
  source 1..20: mol_type = other DNA
tccagcctgggtgacagagc

SEQ ID NO: 48288 - DNA, 20 bp, synthetic construct
  misc_feature 1..20: note = chemically synthesized
  source 1..20: mol_type = other DNA
gtgacagagcaagaatgtct

SEQ ID NO: 48289 - DNA, 20 bp, synthetic construct
  misc_feature 1..20: note = chemically synthesized
  source 1..20: mol_type = other DNA
tgacagagcaagaatgtctc

SEQ ID NO: 48290 - DNA, 20 bp, synthetic construct
  misc_feature 1..20: note = chemically synthesized
  source 1..20: mol_type = other DNA
agagcaagaatgtctcagga

SEQ ID NO: 48291 - DNA, 20 bp, synthetic construct
  misc_feature 1..20: note = chemically synthesized
  source 1..20: mol_type = other DNA
aatatcaatccttcctattc

SEQ ID NO: 48292 - DNA, 20 bp, synthetic construct
  misc_feature 1..20: note = chemically synthesized
  source 1..20: mol_type = other DNA
atcaatccttcctattctag

SEQ ID NO: 48293 - DNA, 20 bp, synthetic construct
  misc_feature 1..20: note = chemically synthesized
  source 1..20: mol_type = other DNA
ccttcctattctagtagttg

SEQ ID NO: 48294 - DNA, 20 bp, synthetic construct
  misc_feature 1..20: note = chemically synthesized
  source 1..20: mol_type = other DNA
atatttttaaaaataaaaca

SEQ ID NO: 48295 - DNA, 20 bp, synthetic construct
  misc_feature 1..20: note = chemically synthesized
  source 1..20: mol_type = other DNA
tatttttaaaaataaaacat

SEQ ID NO: 48296 - DNA, 20 bp, synthetic construct
  misc_feature 1..20: note = chemically synthesized
  source 1..20: mol_type = other DNA
atttttaaaaataaaacata

SEQ ID NO: 48297 - DNA, 20 bp, synthetic construct
  misc_feature 1..20: note = chemically synthesized
  source 1..20: mol_type = other DNA
taaaaataaaacatagggtc

SEQ ID NO: 48298 - DNA, 20 bp, synthetic construct
  misc_feature 1..20: note = chemically synthesized
  source 1..20: mol_type = other DNA
ataaaacatagggtcgagtg

SEQ ID NO: 48299 - DNA, 20 bp, synthetic construct
  misc_feature 1..20: note = chemically synthesized
  source 1..20: mol_type = other DNA
aaacatagggtcgagtgcgg

SEQ ID NO: 48300 - DNA, 20 bp, synthetic construct
  misc_feature 1..20: note = chemically synthesized
  source 1..20: mol_type = other DNA
gtggctcaactctgtaatcc

SEQ ID NO: 48301 - DNA, 20 bp, synthetic construct
  misc_feature 1..20: note = chemically synthesized
  source 1..20: mol_type = other DNA
actctgtaatcccagcactt

SEQ ID NO: 48302 - DNA, 20 bp, synthetic construct
  misc_feature 1..20: note = chemically synthesized
  source 1..20: mol_type = other DNA
ctctgtaatcccagcacttt

SEQ ID NO: 48303 - DNA, 20 bp, synthetic construct
  misc_feature 1..20: note = chemically synthesized
  source 1..20: mol_type = other DNA
ctgtaatcccagcactttgg

SEQ ID NO: 48304 - DNA, 20 bp, synthetic construct
  misc_feature 1..20: note = chemically synthesized
  source 1..20: mol_type = other DNA
tgtaatcccagcactttggg

SEQ ID NO: 48305 - DNA, 20 bp, synthetic construct
  misc_feature 1..20: note = chemically synthesized
  source 1..20: mol_type = other DNA
tcccagcactttgggaggcc

SEQ ID NO: 48306 - DNA, 20 bp, synthetic construct
  misc_feature 1..20: note = chemically synthesized
  source 1..20: mol_type = other DNA
agcactttgggaggccaaga

SEQ ID NO: 48307 - DNA, 20 bp, synthetic construct
  misc_feature 1..20: note = chemically synthesized
  source 1..20: mol_type = other DNA
gcactttgggaggccaagac

SEQ ID NO: 48308 - DNA, 20 bp, synthetic construct
  misc_feature 1..20: note = chemically synthesized
  source 1..20: mol_type = other DNA
ctttgggaggccaagacagg

SEQ ID NO: 48309 - DNA, 20 bp, synthetic construct
  misc_feature 1..20: note = chemically synthesized
  source 1..20: mol_type = other DNA
ggccaagacaggtggatcac

SEQ ID NO: 48310 - DNA, 20 bp, synthetic construct
  misc_feature 1..20: note = chemically synthesized
  source 1..20: mol_type = other DNA
gccaagacaggtggatcaca

SEQ ID NO: 48311 - DNA, 20 bp, synthetic construct
  misc_feature 1..20: note = chemically synthesized
  source 1..20: mol_type = other DNA
agacaggtggatcacaaggt

SEQ ID NO: 48312 - DNA, 20 bp, synthetic construct
  misc_feature 1..20: note = chemically synthesized
  source 1..20: mol_type = other DNA
gacaggtggatcacaaggtc

SEQ ID NO: 48313 - DNA, 20 bp, synthetic construct
  misc_feature 1..20: note = chemically synthesized
  source 1..20: mol_type = other DNA
caggtggatcacaaggtcag

SEQ ID NO: 48314 - DNA, 20 bp, synthetic construct
  misc_feature 1..20: note = chemically synthesized
  source 1..20: mol_type = other DNA
gatcacaaggtcaggagttt

SEQ ID NO: 48315 - DNA, 20 bp, synthetic construct
  misc_feature 1..20: note = chemically synthesized
  source 1..20: mol_type = other DNA
caaggtcaggagtttgagac

SEQ ID NO: 48316 - DNA, 20 bp, synthetic construct
  misc_feature 1..20: note = chemically synthesized
  source 1..20: mol_type = other DNA
gtcaggagtttgagaccagc

SEQ ID NO: 48317 - DNA, 20 bp, synthetic construct
  misc_feature 1..20: note = chemically synthesized
  source 1..20: mol_type = other DNA
tcaggagtttgagaccagcc

SEQ ID NO: 48318 - DNA, 20 bp, synthetic construct
  misc_feature 1..20: note = chemically synthesized
  source 1..20: mol_type = other DNA
tgagaccagccaggccaatg

SEQ ID NO: 48319 - DNA, 20 bp, synthetic construct
  misc_feature 1..20: note = chemically synthesized
  source 1..20: mol_type = other DNA
tctactaaaaatacaaaaat

SEQ ID NO: 48320 - DNA, 20 bp, synthetic construct
  misc_feature 1..20: note = chemically synthesized
  source 1..20: mol_type = other DNA
ctaaaaatacaaaaattagc

SEQ ID NO: 48321 - DNA, 20 bp, synthetic construct
  misc_feature 1..20: note = chemically synthesized
  source 1..20: mol_type = other DNA
taaaaatacaaaaattagcc

SEQ ID NO: 48322 - DNA, 20 bp, synthetic construct
  misc_feature 1..20: note = chemically synthesized
  source 1..20: mol_type = other DNA
atacaaaaattagccaggcg

SEQ ID NO: 48323 - DNA, 20 bp, synthetic construct
  misc_feature 1..20: note = chemically synthesized
  source 1..20: mol_type = other DNA
caaaaattagccaggcgtgg

SEQ ID NO: 48324 - DNA, 20 bp, synthetic construct
  misc_feature 1..20: note = chemically synthesized
  source 1..20: mol_type = other DNA
aaattagccaggcgtggtgg

SEQ ID NO: 48325 - DNA, 20 bp, synthetic construct
  misc_feature 1..20: note = chemically synthesized
  source 1..20: mol_type = other DNA
aattagccaggcgtggtggt

SEQ ID NO: 48326 - DNA, 20 bp, synthetic construct
  misc_feature 1..20: note = chemically synthesized
  source 1..20: mol_type = other DNA
gtggtgggcacctgtaatcc

SEQ ID NO: 48327 - DNA, 20 bp, synthetic construct
  misc_feature 1..20: note = chemically synthesized
  source 1..20: mol_type = other DNA
gcacctgtaatcccagctac

SEQ ID NO: 48328 - DNA, 20 bp, synthetic construct
  misc_feature 1..20: note = chemically synthesized
  source 1..20: mol_type = other DNA
cacctgtaatcccagctact

SEQ ID NO: 48329 - DNA, 20 bp, synthetic construct
  misc_feature 1..20: note = chemically synthesized
  source 1..20: mol_type = other DNA
acctgtaatcccagctacta

SEQ ID NO: 48330 - DNA, 20 bp, synthetic construct
  misc_feature 1..20: note = chemically synthesized
  source 1..20: mol_type = other DNA
ctgtaatcccagctactagg

SEQ ID NO: 48331 - DNA, 20 bp, synthetic construct
  misc_feature 1..20: note = chemically synthesized
  source 1..20: mol_type = other DNA
tgtaatcccagctactaggg

SEQ ID NO: 48332 - DNA, 20 bp, synthetic construct
  misc_feature 1..20: note = chemically synthesized
  source 1..20: mol_type = other DNA
atcccagctactagggaggc

SEQ ID NO: 48333 - DNA, 20 bp, synthetic construct
  misc_feature 1..20: note = chemically synthesized
  source 1..20: mol_type = other DNA
cccagctactagggaggctg

SEQ ID NO: 48334 - DNA, 20 bp, synthetic construct
  misc_feature 1..20: note = chemically synthesized
  source 1..20: mol_type = other DNA
ctggagtattcacttgaacc

SEQ ID NO: 48335 - DNA, 20 bp, synthetic construct
  misc_feature 1..20: note = chemically synthesized
  source 1..20: mol_type = other DNA
tggagtattcacttgaaccc

SEQ ID NO: 48336 - DNA, 20 bp, synthetic construct
  misc_feature 1..20: note = chemically synthesized
  source 1..20: mol_type = other DNA
gagtattcacttgaacccag

SEQ ID NO: 48337 - DNA, 20 bp, synthetic construct
  misc_feature 1..20: note = chemically synthesized
  source 1..20: mol_type = other DNA
agtattcacttgaacccagg

SEQ ID NO: 48338 - DNA, 20 bp, synthetic construct
  misc_feature 1..20: note = chemically synthesized
  source 1..20: mol_type = other DNA
attcacttgaacccaggagg

SEQ ID NO: 48339 - DNA, 20 bp, synthetic construct
  misc_feature 1..20: note = chemically synthesized
  source 1..20: mol_type = other DNA
cacttgaacccaggaggtgg

SEQ ID NO: 48340 - DNA, 20 bp, synthetic construct
  misc_feature 1..20: note = chemically synthesized
  source 1..20: mol_type = other DNA
aacccaggaggtggaagttg

SEQ ID NO: 48341 - DNA, 20 bp, synthetic construct
  misc_feature 1..20: note = chemically synthesized
  source 1..20: mol_type = other DNA
caggaggtggaagttgcagt

SEQ ID NO: 48342 - DNA, 20 bp, synthetic construct
  misc_feature 1..20: note = chemically synthesized
  source 1..20: mol_type = other DNA
gcagtgagccaaaatcacgt

SEQ ID NO: 48343 - DNA, 20 bp, synthetic construct
  misc_feature 1..20: note = chemically synthesized
  source 1..20: mol_type = other DNA
tcacgtcagtgcacttcaac

SEQ ID NO: 48344 - DNA, 20 bp, synthetic construct
  misc_feature 1..20: note = chemically synthesized
  source 1..20: mol_type = other DNA
cacgtcagtgcacttcaacc

SEQ ID NO: 48345 - DNA, 20 bp, synthetic construct
  misc_feature 1..20: note = chemically synthesized
  source 1..20: mol_type = other DNA
acgtcagtgcacttcaaccg

SEQ ID NO: 48346 - DNA, 20 bp, synthetic construct
  misc_feature 1..20: note = chemically synthesized
  source 1..20: mol_type = other DNA
cagtgcacttcaaccggggt

SEQ ID NO: 48347 - DNA, 20 bp, synthetic construct
  misc_feature 1..20: note = chemically synthesized
  source 1..20: mol_type = other DNA
gtgcacttcaaccggggtga

SEQ ID NO: 48348 - DNA, 20 bp, synthetic construct
  misc_feature 1..20: note = chemically synthesized
  source 1..20: mol_type = other DNA
aataaaataaaataaaataa

SEQ ID NO: 48349 - DNA, 20 bp, synthetic construct
  misc_feature 1..20: note = chemically synthesized
  source 1..20: mol_type = other DNA
aataaaataaaataaaagca

SEQ ID NO: 48350 - DNA, 20 bp, synthetic construct
  misc_feature 1..20: note = chemically synthesized
  source 1..20: mol_type = other DNA
tctttccgcaaatgaattca

SEQ ID NO: 48351 - DNA, 20 bp, synthetic construct
  misc_feature 1..20: note = chemically synthesized
  source 1..20: mol_type = other DNA
cttacattttcgttctcatg

SEQ ID NO: 48352 - DNA, 20 bp, synthetic construct
  misc_feature 1..20: note = chemically synthesized
  source 1..20: mol_type = other DNA
attttcgttctcatgaagta

SEQ ID NO: 48353 - DNA, 20 bp, synthetic construct
  misc_feature 1..20: note = chemically synthesized
  source 1..20: mol_type = other DNA
tcgttctcatgaagtaaagc

SEQ ID NO: 48354 - DNA, 20 bp, synthetic construct
  misc_feature 1..20: note = chemically synthesized
  source 1..20: mol_type = other DNA
gttctcatgaagtaaagcaa

SEQ ID NO: 48355 - DNA, 20 bp, synthetic construct
  misc_feature 1..20: note = chemically synthesized
  source 1..20: mol_type = other DNA
ctcatgaagtaaagcaagag

SEQ ID NO: 48356 - DNA, 20 bp, synthetic construct
  misc_feature 1..20: note = chemically synthesized
  source 1..20: mol_type = other DNA
atgaagtaaagcaagagtgg

SEQ ID NO: 48357 - DNA, 20 bp, synthetic construct
  misc_feature 1..20: note = chemically synthesized
  source 1..20: mol_type = other DNA
aaagcaagagtggtagaatt

SEQ ID NO: 48358 - DNA, 20 bp, synthetic construct
  misc_feature 1..20: note = chemically synthesized
  source 1..20: mol_type = other DNA
gcaagagtggtagaattaag

SEQ ID NO: 48359 - DNA, 20 bp, synthetic construct
  misc_feature 1..20: note = chemically synthesized
  source 1..20: mol_type = other DNA
gagtggtagaattaagtgga

SEQ ID NO: 48360 - DNA, 20 bp, synthetic construct
  misc_feature 1..20: note = chemically synthesized
  source 1..20: mol_type = other DNA
gtggtagaattaagtggaaa

SEQ ID NO: 48361 - DNA, 20 bp, synthetic construct
  misc_feature 1..20: note = chemically synthesized
  source 1..20: mol_type = other DNA
aagtggaaagagtctatctc

SEQ ID NO: 48362 - DNA, 20 bp, synthetic construct
  misc_feature 1..20: note = chemically synthesized
  source 1..20: mol_type = other DNA
gaaagagtctatctctagtg

SEQ ID NO: 48363 - DNA, 20 bp, synthetic construct
  misc_feature 1..20: note = chemically synthesized
  source 1..20: mol_type = other DNA
tatctctagtgtagtcacgt

SEQ ID NO: 48364 - DNA, 20 bp, synthetic construct
  misc_feature 1..20: note = chemically synthesized
  source 1..20: mol_type = other DNA
ctctagtgtagtcacgtcag

SEQ ID NO: 48365 - DNA, 20 bp, synthetic construct
  misc_feature 1..20: note = chemically synthesized
  source 1..20: mol_type = other DNA
gtcacgtcagtggttgtgtc

SEQ ID NO: 48366 - DNA, 20 bp, synthetic construct
  misc_feature 1..20: note = chemically synthesized
  source 1..20: mol_type = other DNA
cgtcagtggttgtgtcaaga

SEQ ID NO: 48367 - DNA, 20 bp, synthetic construct
  misc_feature 1..20: note = chemically synthesized
  source 1..20: mol_type = other DNA
agtggttgtgtcaagatggt

SEQ ID NO: 48368 - DNA, 20 bp, synthetic construct
  misc_feature 1..20: note = chemically synthesized
  source 1..20: mol_type = other DNA
gtggttgtgtcaagatggtt

SEQ ID NO: 48369 - DNA, 20 bp, synthetic construct
  misc_feature 1..20: note = chemically synthesized
  source 1..20: mol_type = other DNA
ggttgtgtcaagatggttag

SEQ ID NO: 48370 - DNA, 20 bp, synthetic construct
  misc_feature 1..20: note = chemically synthesized
  source 1..20: mol_type = other DNA
gttgtgtcaagatggttagg

SEQ ID NO: 48371 - DNA, 20 bp, synthetic construct
  misc_feature 1..20: note = chemically synthesized
  source 1..20: mol_type = other DNA
gaggctcctcccgtttaaaa

SEQ ID NO: 48372 - DNA, 20 bp, synthetic construct
  misc_feature 1..20: note = chemically synthesized
  source 1..20: mol_type = other DNA
tcccgtttaaaacagtatcc

SEQ ID NO: 48373 - DNA, 20 bp, synthetic construct
  misc_feature 1..20: note = chemically synthesized
  source 1..20: mol_type = other DNA
ttaaaacagtatccaagccc

SEQ ID NO: 48374 - DNA, 20 bp, synthetic construct
  misc_feature 1..20: note = chemically synthesized
  source 1..20: mol_type = other DNA
agccccagttgtaaatcaat

SEQ ID NO: 48375 - DNA, 20 bp, synthetic construct
  misc_feature 1..20: note = chemically synthesized
  source 1..20: mol_type = other DNA
gccccagttgtaaatcaatt

SEQ ID NO: 48376 - DNA, 20 bp, synthetic construct
  misc_feature 1..20: note = chemically synthesized
  source 1..20: mol_type = other DNA
ccccagttgtaaatcaattg

SEQ ID NO: 48377 - DNA, 20 bp, synthetic construct
  misc_feature 1..20: note = chemically synthesized
  source 1..20: mol_type = other DNA
ccagttgtaaatcaattggg

SEQ ID NO: 48378 - DNA, 20 bp, synthetic construct
  misc_feature 1..20: note = chemically synthesized
  source 1..20: mol_type = other DNA
gacacgccaactctgatcat

SEQ ID NO: 48379 - DNA, 20 bp, synthetic construct
  misc_feature 1..20: note = chemically synthesized
  source 1..20: mol_type = other DNA
tctgatcatcagcaatatct

SEQ ID NO: 48380 - DNA, 20 bp, synthetic construct
  misc_feature 1..20: note = chemically synthesized
  source 1..20: mol_type = other DNA
catcagcaatatctgagctc

SEQ ID NO: 48381 - DNA, 20 bp, synthetic construct
  misc_feature 1..20: note = chemically synthesized
  source 1..20: mol_type = other DNA
caatatctgagctccagtct

SEQ ID NO: 48382 - DNA, 20 bp, synthetic construct
  misc_feature 1..20: note = chemically synthesized
  source 1..20: mol_type = other DNA
ccagtctcagatattgtgtg

SEQ ID NO: 48383 - DNA, 20 bp, synthetic construct
  misc_feature 1..20: note = chemically synthesized
  source 1..20: mol_type = other DNA
tctcagatattgtgtgcagt

SEQ ID NO: 48384 - DNA, 20 bp, synthetic construct
  misc_feature 1..20: note = chemically synthesized
  source 1..20: mol_type = other DNA
ccctctacctccttccctac

SEQ ID NO: 48385 - DNA, 20 bp, synthetic construct
  misc_feature 1..20: note = chemically synthesized
  source 1..20: mol_type = other DNA
taccagaaaaatcaccactt

SEQ ID NO: 48386 - DNA, 20 bp, synthetic construct
  misc_feature 1..20: note = chemically synthesized
  source 1..20: mol_type = other DNA
aaaatcaccactttagtccc

SEQ ID NO: 48387 - DNA, 20 bp, synthetic construct
  misc_feature 1..20: note = chemically synthesized
  source 1..20: mol_type = other DNA
ccactttagtccctggccac

SEQ ID NO: 48388 - DNA, 20 bp, synthetic construct
  misc_feature 1..20: note = chemically synthesized
  source 1..20: mol_type = other DNA
cactttagtccctggccacc

SEQ ID NO: 48389 - DNA, 20 bp, synthetic construct
  misc_feature 1..20: note = chemically synthesized
  source 1..20: mol_type = other DNA
ccctggccaccgggacaccc

SEQ ID NO: 48390 - DNA, 20 bp, synthetic construct
  misc_feature 1..20: note = chemically synthesized
  source 1..20: mol_type = other DNA
cctggccaccgggacacccc

SEQ ID NO: 48391 - DNA, 20 bp, synthetic construct
  misc_feature 1..20: note = chemically synthesized
  source 1..20: mol_type = other DNA
tggccaccgggacaccccag

SEQ ID NO: 48392 - DNA, 20 bp, synthetic construct
  misc_feature 1..20: note = chemically synthesized
  source 1..20: mol_type = other DNA
ggccaccgggacaccccagg

SEQ ID NO: 48393 - DNA, 20 bp, synthetic construct
  misc_feature 1..20: note = chemically synthesized
  source 1..20: mol_type = other DNA
gccaccgggacaccccagga

SEQ ID NO: 48394 - DNA, 20 bp, synthetic construct
  misc_feature 1..20: note = chemically synthesized
  source 1..20: mol_type = other DNA
ccgggacaccccaggagggt

SEQ ID NO: 48395 - DNA, 20 bp, synthetic construct
  misc_feature 1..20: note = chemically synthesized
  source 1..20: mol_type = other DNA
ggacaccccaggagggtgag

SEQ ID NO: 48396 - DNA, 20 bp, synthetic construct
  misc_feature 1..20: note = chemically synthesized
  source 1..20: mol_type = other DNA
cccaggagggtgagtggtct

SEQ ID NO: 48397 - DNA, 20 bp, synthetic construct
  misc_feature 1..20: note = chemically synthesized
  source 1..20: mol_type = other DNA
ccaggagggtgagtggtctg

SEQ ID NO: 48398 - DNA, 20 bp, synthetic construct
  misc_feature 1..20: note = chemically synthesized
  source 1..20: mol_type = other DNA
ggagggtgagtggtctgagg

SEQ ID NO: 48399 - DNA, 20 bp, synthetic construct
  misc_feature 1..20: note = chemically synthesized
  source 1..20: mol_type = other DNA
tgagtggtctgaggtagtta

SEQ ID NO: 48400 - DNA, 20 bp, synthetic construct
  misc_feature 1..20: note = chemically synthesized
  source 1..20: mol_type = other DNA
tgaggtagttatggcactta

SEQ ID NO: 48401 - DNA, 20 bp, synthetic construct
  misc_feature 1..20: note = chemically synthesized
  source 1..20: mol_type = other DNA
tggctcccttgctgctgatc

SEQ ID NO: 48402 - DNA, 20 bp, synthetic construct
  misc_feature 1..20: note = chemically synthesized
  source 1..20: mol_type = other DNA
ttgctgctgatctggaactc

SEQ ID NO: 48403 - DNA, 20 bp, synthetic construct
  misc_feature 1..20: note = chemically synthesized
  source 1..20: mol_type = other DNA
tgatctggaactcaagcccc

SEQ ID NO: 48404 - DNA, 20 bp, synthetic construct
  misc_feature 1..20: note = chemically synthesized
  source 1..20: mol_type = other DNA
tctggaactcaagccccaag

SEQ ID NO: 48405 - DNA, 20 bp, synthetic construct
  misc_feature 1..20: note = chemically synthesized
  source 1..20: mol_type = other DNA
caagccccaagaagtcccct

SEQ ID NO: 48406 - DNA, 20 bp, synthetic construct
  misc_feature 1..20: note = chemically synthesized
  source 1..20: mol_type = other DNA
ggatgatctgaatatacatt

SEQ ID NO: 48407 - DNA, 20 bp, synthetic construct
  misc_feature 1..20: note = chemically synthesized
  source 1..20: mol_type = other DNA
gatgatctgaatatacattt

SEQ ID NO: 48408 - DNA, 20 bp, synthetic construct
  misc_feature 1..20: note = chemically synthesized
  source 1..20: mol_type = other DNA
atctgaatatacatttggga

SEQ ID NO: 48409 - DNA, 20 bp, synthetic construct
  misc_feature 1..20: note = chemically synthesized
  source 1..20: mol_type = other DNA
atatacatttgggacagatc

SEQ ID NO: 48410 - DNA, 20 bp, synthetic construct
  misc_feature 1..20: note = chemically synthesized
  source 1..20: mol_type = other DNA
tatacatttgggacagatct

SEQ ID NO: 48411 - DNA, 20 bp, synthetic construct
  misc_feature 1..20: note = chemically synthesized
  source 1..20: mol_type = other DNA
atacatttgggacagatcta

SEQ ID NO: 48412 - DNA, 20 bp, synthetic construct
  misc_feature 1..20: note = chemically synthesized
  source 1..20: mol_type = other DNA
acatttgggacagatctagg

SEQ ID NO: 48413 - DNA, 20 bp, synthetic construct
  misc_feature 1..20: note = chemically synthesized
  source 1..20: mol_type = other DNA
gacagatctagggagtttct

SEQ ID NO: 48414 - DNA, 20 bp, synthetic construct
  misc_feature 1..20: note = chemically synthesized
  source 1..20: mol_type = other DNA
gggagtttctgagcaacact

SEQ ID NO: 48415 - DNA, 20 bp, synthetic construct
  misc_feature 1..20: note = chemically synthesized
  source 1..20: mol_type = other DNA
tttctgagcaacacttagac

SEQ ID NO: 48416 - DNA, 20 bp, synthetic construct
  misc_feature 1..20: note = chemically synthesized
  source 1..20: mol_type = other DNA
ttctgagcaacacttagact

SEQ ID NO: 48417 - DNA, 20 bp, synthetic construct
  misc_feature 1..20: note = chemically synthesized
  source 1..20: mol_type = other DNA
tctgagcaacacttagactg

SEQ ID NO: 48418 - DNA, 20 bp, synthetic construct
  misc_feature 1..20: note = chemically synthesized
  source 1..20: mol_type = other DNA
cctacttgaattcgctactt

SEQ ID NO: 48419 - DNA, 20 bp, synthetic construct
  misc_feature 1..20: note = chemically synthesized
  source 1..20: mol_type = other DNA
ctacttgaattcgctacttt

SEQ ID NO: 48420 - DNA, 20 bp, synthetic construct
  misc_feature 1..20: note = chemically synthesized
  source 1..20: mol_type = other DNA
aattcgctactttgggactc

SEQ ID NO: 48421 - DNA, 20 bp, synthetic construct
  misc_feature 1..20: note = chemically synthesized
  source 1..20: mol_type = other DNA
ctactttgggactcaagtct

SEQ ID NO: 48422 - DNA, 20 bp, synthetic construct
  misc_feature 1..20: note = chemically synthesized
  source 1..20: mol_type = other DNA
tactttgggactcaagtcta

SEQ ID NO: 48423 - DNA, 20 bp, synthetic construct
  misc_feature 1..20: note = chemically synthesized
  source 1..20: mol_type = other DNA
actttgggactcaagtctaa

SEQ ID NO: 48424 - DNA, 20 bp, synthetic construct
  misc_feature 1..20: note = chemically synthesized
  source 1..20: mol_type = other DNA
ggactcaagtctaagggact

SEQ ID NO: 48425 - DNA, 20 bp, synthetic construct
  misc_feature 1..20: note = chemically synthesized
  source 1..20: mol_type = other DNA
aagtctaagggactgagact

SEQ ID NO: 48426 - DNA, 20 bp, synthetic construct
  misc_feature 1..20: note = chemically synthesized
  source 1..20: mol_type = other DNA
ctaagggactgagactgaga

SEQ ID NO: 48427 - DNA, 20 bp, synthetic construct
  misc_feature 1..20: note = chemically synthesized
  source 1..20: mol_type = other DNA
taagggactgagactgagac

SEQ ID NO: 48428 - DNA, 20 bp, synthetic construct
  misc_feature 1..20: note = chemically synthesized
  source 1..20: mol_type = other DNA
agggactgagactgagacag

SEQ ID NO: 48429 - DNA, 20 bp, synthetic construct
  misc_feature 1..20: note = chemically synthesized
  source 1..20: mol_type = other DNA
ggactgagactgagacagga

SEQ ID NO: 48430 - DNA, 20 bp, synthetic construct
  misc_feature 1..20: note = chemically synthesized
  source 1..20: mol_type = other DNA
agactgagacaggagagcac

SEQ ID NO: 48431 - DNA, 20 bp, synthetic construct
  misc_feature 1..20: note = chemically synthesized
  source 1..20: mol_type = other DNA
ggagagcacaagactaactt

SEQ ID NO: 48432 - DNA, 20 bp, synthetic construct
  misc_feature 1..20: note = chemically synthesized
  source 1..20: mol_type = other DNA
cttgcaactgtcaatgcctc

SEQ ID NO: 48433 - DNA, 20 bp, synthetic construct
  misc_feature 1..20: note = chemically synthesized
  source 1..20: mol_type = other DNA
aatgcctccagccaaatgcc

SEQ ID NO: 48434 - DNA, 20 bp, synthetic construct
  misc_feature 1..20: note = chemically synthesized
  source 1..20: mol_type = other DNA
ctccagccaaatgcccagca

SEQ ID NO: 48435 - DNA, 20 bp, synthetic construct
  misc_feature 1..20: note = chemically synthesized
  source 1..20: mol_type = other DNA
ccagccaaatgcccagcaca

SEQ ID NO: 48436 - DNA, 20 bp, synthetic construct
  misc_feature 1..20: note = chemically synthesized
  source 1..20: mol_type = other DNA
caaatgcccagcacagagct

SEQ ID NO: 48437 - DNA, 20 bp, synthetic construct
  misc_feature 1..20: note = chemically synthesized
  source 1..20: mol_type = other DNA
atgcccagcacagagctcag

SEQ ID NO: 48438 - DNA, 20 bp, synthetic construct
  misc_feature 1..20: note = chemically synthesized
  source 1..20: mol_type = other DNA
gtggatttgactcttccatt

SEQ ID NO: 48439 - DNA, 20 bp, synthetic construct
  misc_feature 1..20: note = chemically synthesized
  source 1..20: mol_type = other DNA
ctcttccattcagaaactca

SEQ ID NO: 48440 - DNA, 20 bp, synthetic construct
  misc_feature 1..20: note = chemically synthesized
  source 1..20: mol_type = other DNA
gcacacttcattctcaatca

SEQ ID NO: 48441 - DNA, 20 bp, synthetic construct
  misc_feature 1..20: note = chemically synthesized
  source 1..20: mol_type = other DNA
cacacttcattctcaatcac

SEQ ID NO: 48442 - DNA, 20 bp, synthetic construct
  misc_feature 1..20: note = chemically synthesized
  source 1..20: mol_type = other DNA
acacttcattctcaatcaca

SEQ ID NO: 48443 - DNA, 20 bp, synthetic construct
  misc_feature 1..20: note = chemically synthesized
  source 1..20: mol_type = other DNA
acttcattctcaatcacagg

SEQ ID NO: 48444 - DNA, 20 bp, synthetic construct
  misc_feature 1..20: note = chemically synthesized
  source 1..20: mol_type = other DNA
cattctcaatcacagggagc

SEQ ID NO: 48445 - DNA, 20 bp, synthetic construct
  misc_feature 1..20: note = chemically synthesized
  source 1..20: mol_type = other DNA
attctcaatcacagggagct

SEQ ID NO: 48446 - DNA, 20 bp, synthetic construct
  misc_feature 1..20: note = chemically synthesized
  source 1..20: mol_type = other DNA
acagggagctgggcttcctt

SEQ ID NO: 48447 - DNA, 20 bp, synthetic construct
  misc_feature 1..20: note = chemically synthesized
  source 1..20: mol_type = other DNA
ggagctgggcttccttgaga

SEQ ID NO: 48448 - DNA, 20 bp, synthetic construct
  misc_feature 1..20: note = chemically synthesized
  source 1..20: mol_type = other DNA
ctgggcttccttgagaaagc

SEQ ID NO: 48449 - DNA, 20 bp, synthetic construct
  misc_feature 1..20: note = chemically synthesized
  source 1..20: mol_type = other DNA
ccttgagaaagccagcccca

SEQ ID NO: 48450 - DNA, 20 bp, synthetic construct
  misc_feature 1..20: note = chemically synthesized
  source 1..20: mol_type = other DNA
cttgagaaagccagccccaa

SEQ ID NO: 48451 - DNA, 20 bp, synthetic construct
  misc_feature 1..20: note = chemically synthesized
  source 1..20: mol_type = other DNA
caaaggtacctgtgtttaaa

SEQ ID NO: 48452 - DNA, 20 bp, synthetic construct
  misc_feature 1..20: note = chemically synthesized
  source 1..20: mol_type = other DNA
acctgtgtttaaaaagatga

SEQ ID NO: 48453 - DNA, 20 bp, synthetic construct
  misc_feature 1..20: note = chemically synthesized
  source 1..20: mol_type = other DNA
gtttaaaaagatgaaagaaa

SEQ ID NO: 48454 - DNA, 20 bp, synthetic construct
  misc_feature 1..20: note = chemically synthesized
  source 1..20: mol_type = other DNA
tacgtccacaacatgttcac

SEQ ID NO: 48455 - DNA, 20 bp, synthetic construct
  misc_feature 1..20: note = chemically synthesized
  source 1..20: mol_type = other DNA
acgtccacaacatgttcaca

SEQ ID NO: 48456 - DNA, 20 bp, synthetic construct
  misc_feature 1..20: note = chemically synthesized
  source 1..20: mol_type = other DNA
acatgttcacaaggaaactc

SEQ ID NO: 48457 - DNA, 20 bp, synthetic construct
  misc_feature 1..20: note = chemically synthesized
  source 1..20: mol_type = other DNA
tgttcacaaggaaactccag

SEQ ID NO: 48458 - DNA, 20 bp, synthetic construct
  misc_feature 1..20: note = chemically synthesized
  source 1..20: mol_type = other DNA
acaaggaaactccagaagaa

SEQ ID NO: 48459 - DNA, 20 bp, synthetic construct
  misc_feature 1..20: note = chemically synthesized
  source 1..20: mol_type = other DNA
aaggaaactccagaagaaca

SEQ ID NO: 48460 - DNA, 20 bp, synthetic construct
  misc_feature 1..20: note = chemically synthesized
  source 1..20: mol_type = other DNA
gaaactccagaagaacagag

SEQ ID NO: 48461 - DNA, 20 bp, synthetic construct
  misc_feature 1..20: note = chemically synthesized
  source 1..20: mol_type = other DNA
actccagaagaacagagcag

SEQ ID NO: 48462 - DNA, 20 bp, synthetic construct
  misc_feature 1..20: note = chemically synthesized
  source 1..20: mol_type = other DNA
gaagaacagagcagtggtga

SEQ ID NO: 48463 - DNA, 20 bp, synthetic construct
  misc_feature 1..20: note = chemically synthesized
  source 1..20: mol_type = other DNA
tggacctcctgtctgtccgt

SEQ ID NO: 48464 - DNA, 20 bp, synthetic construct
  misc_feature 1..20: note = chemically synthesized
  source 1..20: mol_type = other DNA
ggacctcctgtctgtccgtg

SEQ ID NO: 48465 - DNA, 20 bp, synthetic construct
  misc_feature 1..20: note = chemically synthesized
  source 1..20: mol_type = other DNA
cctgtctgtccgtgaggctg

SEQ ID NO: 48466 - DNA, 20 bp, synthetic construct
  misc_feature 1..20: note = chemically synthesized
  source 1..20: mol_type = other DNA
tccgtgaggctgtagaacac

SEQ ID NO: 48467 - DNA, 20 bp, synthetic construct
  misc_feature 1..20: note = chemically synthesized
  source 1..20: mol_type = other DNA
ccgtgaggctgtagaacaca

SEQ ID NO: 48468 - DNA, 20 bp, synthetic construct
  misc_feature 1..20: note = chemically synthesized
  source 1..20: mol_type = other DNA
tgaggctgtagaacacaagg

SEQ ID NO: 48469 - DNA, 20 bp, synthetic construct
  misc_feature 1..20: note = chemically synthesized
  source 1..20: mol_type = other DNA
aaggcagctcccaatgctgc

SEQ ID NO: 48470 - DNA, 20 bp, synthetic construct
  misc_feature 1..20: note = chemically synthesized
  source 1..20: mol_type = other DNA
ctgccagactctctgaaccc

SEQ ID NO: 48471 - DNA, 20 bp, synthetic construct
  misc_feature 1..20: note = chemically synthesized
  source 1..20: mol_type = other DNA
gccagactctctgaaccctg

SEQ ID NO: 48472 - DNA, 20 bp, synthetic construct
  misc_feature 1..20: note = chemically synthesized
  source 1..20: mol_type = other DNA
cagactctctgaaccctgga

SEQ ID NO: 48473 - DNA, 20 bp, synthetic construct
  misc_feature 1..20: note = chemically synthesized
  source 1..20: mol_type = other DNA
ggagagtgtaaacgtcatat

SEQ ID NO: 48474 - DNA, 20 bp, synthetic construct
  misc_feature 1..20: note = chemically synthesized
  source 1..20: mol_type = other DNA
agagtgtaaacgtcatataa

SEQ ID NO: 48475 - DNA, 20 bp, synthetic construct
  misc_feature 1..20: note = chemically synthesized
  source 1..20: mol_type = other DNA
gagtctatgttccaaaaacc

SEQ ID NO: 48476 - DNA, 20 bp, synthetic construct
  misc_feature 1..20: note = chemically synthesized
  source 1..20: mol_type = other DNA
aaacctggatttaacaatct

SEQ ID NO: 48477 - DNA, 20 bp, synthetic construct
  misc_feature 1..20: note = chemically synthesized
  source 1..20: mol_type = other DNA
taacaatctgagctttgtca

SEQ ID NO: 48478 - DNA, 20 bp, synthetic construct
  misc_feature 1..20: note = chemically synthesized
  source 1..20: mol_type = other DNA
agctttgtcatggtgctttg

SEQ ID NO: 48479 - DNA, 20 bp, synthetic construct
  misc_feature 1..20: note = chemically synthesized
  source 1..20: mol_type = other DNA
ttgtcatggtgctttgcggt

SEQ ID NO: 48480 - DNA, 20 bp, synthetic construct
  misc_feature 1..20: note = chemically synthesized
  source 1..20: mol_type = other DNA
tctttgcttttaaaaccata

SEQ ID NO: 48481 - DNA, 20 bp, synthetic construct
  misc_feature 1..20: note = chemically synthesized
  source 1..20: mol_type = other DNA
taaagaataatgtttaaatg

SEQ ID NO: 48482 - DNA, 20 bp, synthetic construct
  misc_feature 1..20: note = chemically synthesized
  source 1..20: mol_type = other DNA
aagaataatgtttaaatgta

SEQ ID NO: 48483 - DNA, 20 bp, synthetic construct
  misc_feature 1..20: note = chemically synthesized
  source 1..20: mol_type = other DNA
aatgtttaaatgtagagtct

SEQ ID NO: 48484 - DNA, 20 bp, synthetic construct
  misc_feature 1..20: note = chemically synthesized
  source 1..20: mol_type = other DNA
tgctattgtttttatatttt

SEQ ID NO: 48485 - DNA, 20 bp, synthetic construct
  misc_feature 1..20: note = chemically synthesized
  source 1..20: mol_type = other DNA
ttcactcaacattacataat

SEQ ID NO: 48486 - DNA, 20 bp, synthetic construct
  misc_feature 1..20: note = chemically synthesized
  source 1..20: mol_type = other DNA
attacataatgagttttgta

SEQ ID NO: 48487 - DNA, 20 bp, synthetic construct
  misc_feature 1..20: note = chemically synthesized
  source 1..20: mol_type = other DNA
tcttcataactaatatttta

SEQ ID NO: 48488 - DNA, 20 bp, synthetic construct
  misc_feature 1..20: note = chemically synthesized
  source 1..20: mol_type = other DNA
cttcataactaatattttaa

SEQ ID NO: 48489 - DNA, 20 bp, synthetic construct
  misc_feature 1..20: note = chemically synthesized
  source 1..20: mol_type = other DNA
tcataactaatattttaaag

SEQ ID NO: 48490 - DNA, 20 bp, synthetic construct
  misc_feature 1..20: note = chemically synthesized
  source 1..20: mol_type = other DNA
ataactaatattttaaagga

SEQ ID NO: 48491 - DNA, 20 bp, synthetic construct
  misc_feature 1..20: note = chemically synthesized
  source 1..20: mol_type = other DNA
aaggagagctactgattaat

SEQ ID NO: 48492 - DNA, 20 bp, synthetic construct
  misc_feature 1..20: note = chemically synthesized
  source 1..20: mol_type = other DNA
agctactgattaatgagcat

SEQ ID NO: 48493 - DNA, 20 bp, synthetic construct
  misc_feature 1..20: note = chemically synthesized
  source 1..20: mol_type = other DNA
gctactgattaatgagcatg

SEQ ID NO: 48494 - DNA, 20 bp, synthetic construct
  misc_feature 1..20: note = chemically synthesized
  source 1..20: mol_type = other DNA
aatgagcatgaggtttcctt

SEQ ID NO: 48495 - DNA, 20 bp, synthetic construct
  misc_feature 1..20: note = chemically synthesized
  source 1..20: mol_type = other DNA
atgagcatgaggtttccttt

SEQ ID NO: 48496 - DNA, 20 bp, synthetic construct
  misc_feature 1..20: note = chemically synthesized
  source 1..20: mol_type = other DNA
tgagcatgaggtttcctttg

SEQ ID NO: 48497 - DNA, 20 bp, synthetic construct
  misc_feature 1..20: note = chemically synthesized
  source 1..20: mol_type = other DNA
atgaggtttcctttggggat

SEQ ID NO: 48498 - DNA, 20 bp, synthetic construct
  misc_feature 1..20: note = chemically synthesized
  source 1..20: mol_type = other DNA
tgaggtttcctttggggatg

SEQ ID NO: 48499 - DNA, 20 bp, synthetic construct
  misc_feature 1..20: note = chemically synthesized
  source 1..20: mol_type = other DNA
tggggatgaggaaaatattc

SEQ ID NO: 48500 - DNA, 20 bp, synthetic construct
  misc_feature 1..20: note = chemically synthesized
  source 1..20: mol_type = other DNA
atattctggaaatatgatga

SEQ ID NO: 48501 - DNA, 20 bp, synthetic construct
  misc_feature 1..20: note = chemically synthesized
  source 1..20: mol_type = other DNA
tgaatgtactaaatgccact

SEQ ID NO: 48502 - DNA, 20 bp, synthetic construct
  misc_feature 1..20: note = chemically synthesized
  source 1..20: mol_type = other DNA
atgtactaaatgccacttgg

SEQ ID NO: 48503 - DNA, 20 bp, synthetic construct
  misc_feature 1..20: note = chemically synthesized
  source 1..20: mol_type = other DNA
ttggtggtaccctgcaaaaa

SEQ ID NO: 48504 - DNA, 20 bp, synthetic construct
  misc_feature 1..20: note = chemically synthesized
  source 1..20: mol_type = other DNA
ccctgcaaaaatggttaaaa

SEQ ID NO: 48505 - DNA, 20 bp, synthetic construct
  misc_feature 1..20: note = chemically synthesized
  source 1..20: mol_type = other DNA
tacattttattgcaataaaa

SEQ ID NO: 48506 - DNA, 20 bp, synthetic construct
  misc_feature 1..20: note = chemically synthesized
  source 1..20: mol_type = other DNA
tttattgcaataaaaaagaa

SEQ ID NO: 48507 - DNA, 20 bp, synthetic construct
  misc_feature 1..20: note = chemically synthesized
  source 1..20: mol_type = other DNA
aagaatagtcatcatttact

SEQ ID NO: 48508 - DNA, 20 bp, synthetic construct
  misc_feature 1..20: note = chemically synthesized
  source 1..20: mol_type = other DNA
ttactaagcattatcctttc

SEQ ID NO: 48509 - DNA, 20 bp, synthetic construct
  misc_feature 1..20: note = chemically synthesized
  source 1..20: mol_type = other DNA
tactaagcattatcctttcc

SEQ ID NO: 48510 - DNA, 20 bp, synthetic construct
  misc_feature 1..20: note = chemically synthesized
  source 1..20: mol_type = other DNA
gcattatcctttccaggcac

SEQ ID NO: 48511 - DNA, 20 bp, synthetic construct
  misc_feature 1..20: note = chemically synthesized
  source 1..20: mol_type = other DNA
ccaggcacaagcttataatg

SEQ ID NO: 48512 - DNA, 20 bp, synthetic construct
  misc_feature 1..20: note = chemically synthesized
  source 1..20: mol_type = other DNA
atctcacttcatcctcacaa

SEQ ID NO: 48513 - DNA, 20 bp, synthetic construct
  misc_feature 1..20: note = chemically synthesized
  source 1..20: mol_type = other DNA
ctcacaacagtcctatgaaa

SEQ ID NO: 48514 - DNA, 20 bp, synthetic construct
  misc_feature 1..20: note = chemically synthesized
  source 1..20: mol_type = other DNA
tcacaacagtcctatgaaac

SEQ ID NO: 48515 - DNA, 20 bp, synthetic construct
  misc_feature 1..20: note = chemically synthesized
  source 1..20: mol_type = other DNA
caacagtcctatgaaacagg

SEQ ID NO: 48516 - DNA, 20 bp, synthetic construct
  misc_feature 1..20: note = chemically synthesized
  source 1..20: mol_type = other DNA
gttccatcactcctgctcta

SEQ ID NO: 48517 - DNA, 20 bp, synthetic construct
  misc_feature 1..20: note = chemically synthesized
  source 1..20: mol_type = other DNA
atcactcctgctctacagtt

SEQ ID NO: 48518 - DNA, 20 bp, synthetic construct
  misc_feature 1..20: note = chemically synthesized
  source 1..20: mol_type = other DNA
tcactcctgctctacagtta

SEQ ID NO: 48519 - DNA, 20 bp, synthetic construct
  misc_feature 1..20: note = chemically synthesized
  source 1..20: mol_type = other DNA
gctctacagttaaggaaact

SEQ ID NO: 48520 - DNA, 20 bp, synthetic construct
  misc_feature 1..20: note = chemically synthesized
  source 1..20: mol_type = other DNA
ctctacagttaaggaaactg

SEQ ID NO: 48521 - DNA, 20 bp, synthetic construct
  misc_feature 1..20: note = chemically synthesized
  source 1..20: mol_type = other DNA
agttaaggaaactgaggtgt

SEQ ID NO: 48522 - DNA, 20 bp, synthetic construct
  misc_feature 1..20: note = chemically synthesized
  source 1..20: mol_type = other DNA
gttaaggaaactgaggtgta

SEQ ID NO: 48523 - DNA, 20 bp, synthetic construct
  misc_feature 1..20: note = chemically synthesized
  source 1..20: mol_type = other DNA
taaggaaactgaggtgtaag

SEQ ID NO: 48524 - DNA, 20 bp, synthetic construct
  misc_feature 1..20: note = chemically synthesized
  source 1..20: mol_type = other DNA
aaggaaactgaggtgtaagg

SEQ ID NO: 48525 - DNA, 20 bp, synthetic construct
  misc_feature 1..20: note = chemically synthesized
  source 1..20: mol_type = other DNA
tgaggtgtaaggaggttgtc

SEQ ID NO: 48526 - DNA, 20 bp, synthetic construct
  misc_feature 1..20: note = chemically synthesized
  source 1..20: mol_type = other DNA
gaggttgtctagttcaacct

SEQ ID NO: 48527 - DNA, 20 bp, synthetic construct
  misc_feature 1..20: note = chemically synthesized
  source 1..20: mol_type = other DNA
tgtctagttcaacctgagcc

SEQ ID NO: 48528 - DNA, 20 bp, synthetic construct
  misc_feature 1..20: note = chemically synthesized
  source 1..20: mol_type = other DNA
gtctagttcaacctgagcct

SEQ ID NO: 48529 - DNA, 20 bp, synthetic construct
  misc_feature 1..20: note = chemically synthesized
  source 1..20: mol_type = other DNA
tcaacctgagcctgggtctg

SEQ ID NO: 48530 - DNA, 20 bp, synthetic construct
  misc_feature 1..20: note = chemically synthesized
  source 1..20: mol_type = other DNA
aacctgagcctgggtctgcg

SEQ ID NO: 48531 - DNA, 20 bp, synthetic construct
  misc_feature 1..20: note = chemically synthesized
  source 1..20: mol_type = other DNA
tgcttcctccccgtgcgcgt

SEQ ID NO: 48532 - DNA, 20 bp, synthetic construct
  misc_feature 1..20: note = chemically synthesized
  source 1..20: mol_type = other DNA
cctccacatctttgttcata

SEQ ID NO: 48533 - DNA, 20 bp, synthetic construct
  misc_feature 1..20: note = chemically synthesized
  source 1..20: mol_type = other DNA
cttattccttaatattttct

SEQ ID NO: 48534 - DNA, 20 bp, synthetic construct
  misc_feature 1..20: note = chemically synthesized
  source 1..20: mol_type = other DNA
ccttaatattttctgagcct

SEQ ID NO: 48535 - DNA, 20 bp, synthetic construct
  misc_feature 1..20: note = chemically synthesized
  source 1..20: mol_type = other DNA
ctaagttcccataaattata

SEQ ID NO: 48536 - DNA, 20 bp, synthetic construct
  misc_feature 1..20: note = chemically synthesized
  source 1..20: mol_type = other DNA
aacactgccaatttattttc

SEQ ID NO: 48537 - DNA, 20 bp, synthetic construct
  misc_feature 1..20: note = chemically synthesized
  source 1..20: mol_type = other DNA
actgccaatttattttctag

SEQ ID NO: 48538 - DNA, 20 bp, synthetic construct
  misc_feature 1..20: note = chemically synthesized
  source 1..20: mol_type = other DNA
ctgccaatttattttctaga

SEQ ID NO: 48539 - DNA, 20 bp, synthetic construct
  misc_feature 1..20: note = chemically synthesized
  source 1..20: mol_type = other DNA
tattttctagaaggttatga

SEQ ID NO: 48540 - DNA, 20 bp, synthetic construct
  misc_feature 1..20: note = chemically synthesized
  source 1..20: mol_type = other DNA
atgacagtgtaaaatgtcac

SEQ ID NO: 48541 - DNA, 20 bp, synthetic construct
  misc_feature 1..20: note = chemically synthesized
  source 1..20: mol_type = other DNA
tcacttcaccacacttgtat

SEQ ID NO: 48542 - DNA, 20 bp, synthetic construct
  misc_feature 1..20: note = chemically synthesized
  source 1..20: mol_type = other DNA
agtgttcaatttttaaatat

SEQ ID NO: 48543 - DNA, 20 bp, synthetic construct
  misc_feature 1..20: note = chemically synthesized
  source 1..20: mol_type = other DNA
ttaaatattagctaatctaa

SEQ ID NO: 48544 - DNA, 20 bp, synthetic construct
  misc_feature 1..20: note = chemically synthesized
  source 1..20: mol_type = other DNA
taaatattagctaatctaac

SEQ ID NO: 48545 - DNA, 20 bp, synthetic construct
  misc_feature 1..20: note = chemically synthesized
  source 1..20: mol_type = other DNA
tttatacttctttgacaatt

SEQ ID NO: 48546 - DNA, 20 bp, synthetic construct
  misc_feature 1..20: note = chemically synthesized
  source 1..20: mol_type = other DNA
ttatacttctttgacaattt

SEQ ID NO: 48547 - DNA, 20 bp, synthetic construct
  misc_feature 1..20: note = chemically synthesized
  source 1..20: mol_type = other DNA
atacttctttgacaatttgg

SEQ ID NO: 48548 - DNA, 20 bp, synthetic construct
  misc_feature 1..20: note = chemically synthesized
  source 1..20: mol_type = other DNA
acttctttgacaatttggga

SEQ ID NO: 48549 - DNA, 20 bp, synthetic construct
  misc_feature 1..20: note = chemically synthesized
  source 1..20: mol_type = other DNA
tttgacaatttgggagagtg

SEQ ID NO: 48550 - DNA, 20 bp, synthetic construct
  misc_feature 1..20: note = chemically synthesized
  source 1..20: mol_type = other DNA
tgggagagtgaagattctcc

SEQ ID NO: 48551 - DNA, 20 bp, synthetic construct
  misc_feature 1..20: note = chemically synthesized
  source 1..20: mol_type = other DNA
ttttctttgccaaattcaaa

SEQ ID NO: 48552 - DNA, 20 bp, synthetic construct
  misc_feature 1..20: note = chemically synthesized
  source 1..20: mol_type = other DNA
tttgccaaattcaaatagaa

SEQ ID NO: 48553 - DNA, 20 bp, synthetic construct
  misc_feature 1..20: note = chemically synthesized
  source 1..20: mol_type = other DNA
tagaacggttgcaaaattgc

SEQ ID NO: 48554 - DNA, 20 bp, synthetic construct
  misc_feature 1..20: note = chemically synthesized
  source 1..20: mol_type = other DNA
gaacggttgcaaaattgcca

SEQ ID NO: 48555 - DNA, 20 bp, synthetic construct
  misc_feature 1..20: note = chemically synthesized
  source 1..20: mol_type = other DNA
aacggttgcaaaattgccag

SEQ ID NO: 48556 - DNA, 20 bp, synthetic construct
  misc_feature 1..20: note = chemically synthesized
  source 1..20: mol_type = other DNA
cagaggaaatgctgtttttc

SEQ ID NO: 48557 - DNA, 20 bp, synthetic construct
  misc_feature 1..20: note = chemically synthesized
  source 1..20: mol_type = other DNA
ggaaatgctgtttttccaga

SEQ ID NO: 48558 - DNA, 20 bp, synthetic construct
  misc_feature 1..20: note = chemically synthesized
  source 1..20: mol_type = other DNA
tttttccagatggacacacc

SEQ ID NO: 48559 - DNA, 20 bp, synthetic construct
  misc_feature 1..20: note = chemically synthesized
  source 1..20: mol_type = other DNA
ttttccagatggacacaccc

SEQ ID NO: 48560 - DNA, 20 bp, synthetic construct
  misc_feature 1..20: note = chemically synthesized
  source 1..20: mol_type = other DNA
tttccagatggacacaccca

SEQ ID NO: 48561 - DNA, 20 bp, synthetic construct
  misc_feature 1..20: note = chemically synthesized
  source 1..20: mol_type = other DNA
ggacacacccagggatgttt

SEQ ID NO: 48562 - DNA, 20 bp, synthetic construct
  misc_feature 1..20: note = chemically synthesized
  source 1..20: mol_type = other DNA
cagtgttctcacaaataatc

SEQ ID NO: 48563 - DNA, 20 bp, synthetic construct
  misc_feature 1..20: note = chemically synthesized
  source 1..20: mol_type = other DNA
atccagttttctaattttgc

SEQ ID NO: 48564 - DNA, 20 bp, synthetic construct
  misc_feature 1..20: note = chemically synthesized
  source 1..20: mol_type = other DNA
gttttctaattttgcaagcc

SEQ ID NO: 48565 - DNA, 20 bp, synthetic construct
  misc_feature 1..20: note = chemically synthesized
  source 1..20: mol_type = other DNA
tttgcaagcccagctttcat

SEQ ID NO: 48566 - DNA, 20 bp, synthetic construct
  misc_feature 1..20: note = chemically synthesized
  source 1..20: mol_type = other DNA
tgcaaaaatccttgctttgc

SEQ ID NO: 48567 - DNA, 20 bp, synthetic construct
  misc_feature 1..20: note = chemically synthesized
  source 1..20: mol_type = other DNA
aaatccttgctttgcgagca

SEQ ID NO: 48568 - DNA, 20 bp, synthetic construct
  misc_feature 1..20: note = chemically synthesized
  source 1..20: mol_type = other DNA
cttgctttgcgagcatggca

SEQ ID NO: 48569 - DNA, 20 bp, synthetic construct
  misc_feature 1..20: note = chemically synthesized
  source 1..20: mol_type = other DNA
ttgctttgcgagcatggcac

SEQ ID NO: 48570 - DNA, 20 bp, synthetic construct
  misc_feature 1..20: note = chemically synthesized
  source 1..20: mol_type = other DNA
tttgcgagcatggcacaggc

SEQ ID NO: 48571 - DNA, 20 bp, synthetic construct
  misc_feature 1..20: note = chemically synthesized
  source 1..20: mol_type = other DNA
tgcgagcatggcacaggcaa

SEQ ID NO: 48572 - DNA, 20 bp, synthetic construct
  misc_feature 1..20: note = chemically synthesized
  source 1..20: mol_type = other DNA
gcatggcacaggcaagagat

SEQ ID NO: 48573 - DNA, 20 bp, synthetic construct
  misc_feature 1..20: note = chemically synthesized
  source 1..20: mol_type = other DNA
catggcacaggcaagagatg

SEQ ID NO: 48574 - DNA, 20 bp, synthetic construct
  misc_feature 1..20: note = chemically synthesized
  source 1..20: mol_type = other DNA
gcactctctctttcttcccc

SEQ ID NO: 48575 - DNA, 20 bp, synthetic construct
  misc_feature 1..20: note = chemically synthesized
  source 1..20: mol_type = other DNA
actctctctttcttccccca

SEQ ID NO: 48576 - DNA, 20 bp, synthetic construct
  misc_feature 1..20: note = chemically synthesized
  source 1..20: mol_type = other DNA
ccagagcctttgactgcact

SEQ ID NO: 48577 - DNA, 20 bp, synthetic construct
  misc_feature 1..20: note = chemically synthesized
  source 1..20: mol_type = other DNA
tgcacttagatcattgactt

SEQ ID NO: 48578 - DNA, 20 bp, synthetic construct
  misc_feature 1..20: note = chemically synthesized
  source 1..20: mol_type = other DNA
ttagatcattgactttggtt

SEQ ID NO: 48579 - DNA, 20 bp, synthetic construct
  misc_feature 1..20: note = chemically synthesized
  source 1..20: mol_type = other DNA
ttcagaaacctgactgcatc

SEQ ID NO: 48580 - DNA, 20 bp, synthetic construct
  misc_feature 1..20: note = chemically synthesized
  source 1..20: mol_type = other DNA
cagaaacctgactgcatctg

SEQ ID NO: 48581 - DNA, 20 bp, synthetic construct
  misc_feature 1..20: note = chemically synthesized
  source 1..20: mol_type = other DNA
actgcatctggagttgacat

SEQ ID NO: 48582 - DNA, 20 bp, synthetic construct
  misc_feature 1..20: note = chemically synthesized
  source 1..20: mol_type = other DNA
gcatctggagttgacatgag

SEQ ID NO: 48583 - DNA, 20 bp, synthetic construct
  misc_feature 1..20: note = chemically synthesized
  source 1..20: mol_type = other DNA
tggagttgacatgagcagca

SEQ ID NO: 48584 - DNA, 20 bp, synthetic construct
  misc_feature 1..20: note = chemically synthesized
  source 1..20: mol_type = other DNA
agttgacatgagcagcatgg

SEQ ID NO: 48585 - DNA, 20 bp, synthetic construct
  misc_feature 1..20: note = chemically synthesized
  source 1..20: mol_type = other DNA
agcatggaagatgtttgtcc

SEQ ID NO: 48586 - DNA, 20 bp, synthetic construct
  misc_feature 1..20: note = chemically synthesized
  source 1..20: mol_type = other DNA
tttgtcccagcacctcactc

SEQ ID NO: 48587 - DNA, 20 bp, synthetic construct
  misc_feature 1..20: note = chemically synthesized
  source 1..20: mol_type = other DNA
tgtcccagcacctcactcca

SEQ ID NO: 48588 - DNA, 20 bp, synthetic construct
  misc_feature 1..20: note = chemically synthesized
  source 1..20: mol_type = other DNA
gtcccagcacctcactccag

SEQ ID NO: 48589 - DNA, 20 bp, synthetic construct
  misc_feature 1..20: note = chemically synthesized
  source 1..20: mol_type = other DNA
cagcacctcactccagaggc

SEQ ID NO: 48590 - DNA, 20 bp, synthetic construct
  misc_feature 1..20: note = chemically synthesized
  source 1..20: mol_type = other DNA
cctcactccagaggccagct

SEQ ID NO: 48591 - DNA, 20 bp, synthetic construct
  misc_feature 1..20: note = chemically synthesized
  source 1..20: mol_type = other DNA
gaggccagctcagctcaatc

SEQ ID NO: 48592 - DNA, 20 bp, synthetic construct
  misc_feature 1..20: note = chemically synthesized
  source 1..20: mol_type = other DNA
aggccagctcagctcaatct

SEQ ID NO: 48593 - DNA, 20 bp, synthetic construct
  misc_feature 1..20: note = chemically synthesized
  source 1..20: mol_type = other DNA
ccagctcagctcaatctggg

SEQ ID NO: 48594 - DNA, 20 bp, synthetic construct
  misc_feature 1..20: note = chemically synthesized
  source 1..20: mol_type = other DNA
agctcagctcaatctgggca

SEQ ID NO: 48595 - DNA, 20 bp, synthetic construct
  misc_feature 1..20: note = chemically synthesized
  source 1..20: mol_type = other DNA
atctgggcagagctgcatga

SEQ ID NO: 48596 - DNA, 20 bp, synthetic construct
  misc_feature 1..20: note = chemically synthesized
  source 1..20: mol_type = other DNA
tgggcagagctgcatgatgg

SEQ ID NO: 48597 - DNA, 20 bp, synthetic construct
  misc_feature 1..20: note = chemically synthesized
  source 1..20: mol_type = other DNA
gatggaagtttctgactacc

SEQ ID NO: 48598 - DNA, 20 bp, synthetic construct
  misc_feature 1..20: note = chemically synthesized
  source 1..20: mol_type = other DNA
agtttctgactaccaagcat

SEQ ID NO: 48599 - DNA, 20 bp, synthetic construct
  misc_feature 1..20: note = chemically synthesized
  source 1..20: mol_type = other DNA
gtttctgactaccaagcatc

SEQ ID NO: 48600 - DNA, 20 bp, synthetic construct
  misc_feature 1..20: note = chemically synthesized
  source 1..20: mol_type = other DNA
tctgactaccaagcatcggg

SEQ ID NO: 48601 - DNA, 20 bp, synthetic construct
  misc_feature 1..20: note = chemically synthesized
  source 1..20: mol_type = other DNA
tgactaccaagcatcgggca

SEQ ID NO: 48602 - DNA, 20 bp, synthetic construct
  misc_feature 1..20: note = chemically synthesized
  source 1..20: mol_type = other DNA
gactaccaagcatcgggcag

SEQ ID NO: 48603 - DNA, 20 bp, synthetic construct
  misc_feature 1..20: note = chemically synthesized
  source 1..20: mol_type = other DNA
actaccaagcatcgggcaga

SEQ ID NO: 48604 - DNA, 20 bp, synthetic construct
  misc_feature 1..20: note = chemically synthesized
  source 1..20: mol_type = other DNA
cgggcagagggtgcatcacc

SEQ ID NO: 48605 - DNA, 20 bp, synthetic construct
  misc_feature 1..20: note = chemically synthesized
  source 1..20: mol_type = other DNA
ggtgcatcacctggactaca

SEQ ID NO: 48606 - DNA, 20 bp, synthetic construct
  misc_feature 1..20: note = chemically synthesized
  source 1..20: mol_type = other DNA
cctggactacatagttgtgt

SEQ ID NO: 48607 - DNA, 20 bp, synthetic construct
  misc_feature 1..20: note = chemically synthesized
  source 1..20: mol_type = other DNA
ctggactacatagttgtgtg

SEQ ID NO: 48608 - DNA, 20 bp, synthetic construct
  misc_feature 1..20: note = chemically synthesized
  source 1..20: mol_type = other DNA
tggactacatagttgtgtga

SEQ ID NO: 48609 - DNA, 20 bp, synthetic construct
  misc_feature 1..20: note = chemically synthesized
  source 1..20: mol_type = other DNA
gactacatagttgtgtgagg

SEQ ID NO: 48610 - DNA, 20 bp, synthetic construct
  misc_feature 1..20: note = chemically synthesized
  source 1..20: mol_type = other DNA
tgtgagggagcaccgttctc

SEQ ID NO: 48611 - DNA, 20 bp, synthetic construct
  misc_feature 1..20: note = chemically synthesized
  source 1..20: mol_type = other DNA
ttctctagaatctgctattt

SEQ ID NO: 48612 - DNA, 20 bp, synthetic construct
  misc_feature 1..20: note = chemically synthesized
  source 1..20: mol_type = other DNA
ctagaatctgctatttgagc

SEQ ID NO: 48613 - DNA, 20 bp, synthetic construct
  misc_feature 1..20: note = chemically synthesized
  source 1..20: mol_type = other DNA
tagaatctgctatttgagca

SEQ ID NO: 48614 - DNA, 20 bp, synthetic construct
  misc_feature 1..20: note = chemically synthesized
  source 1..20: mol_type = other DNA
caaggcaaacatcctgataa

SEQ ID NO: 48615 - DNA, 20 bp, synthetic construct
  misc_feature 1..20: note = chemically synthesized
  source 1..20: mol_type = other DNA
taatggtgaaaacctaccgc

SEQ ID NO: 48616 - DNA, 20 bp, synthetic construct
  misc_feature 1..20: note = chemically synthesized
  source 1..20: mol_type = other DNA
gaaaacctaccgcaagttgc

SEQ ID NO: 48617 - DNA, 20 bp, synthetic construct
  misc_feature 1..20: note = chemically synthesized
  source 1..20: mol_type = other DNA
aaaacctaccgcaagttgcc

SEQ ID NO: 48618 - DNA, 20 bp, synthetic construct
  misc_feature 1..20: note = chemically synthesized
  source 1..20: mol_type = other DNA
cctaccgcaagttgccagga

SEQ ID NO: 48619 - DNA, 20 bp, synthetic construct
  misc_feature 1..20: note = chemically synthesized
  source 1..20: mol_type = other DNA
agttgccaggaaagttgatg

SEQ ID NO: 48620 - DNA, 20 bp, synthetic construct
  misc_feature 1..20: note = chemically synthesized
  source 1..20: mol_type = other DNA
ggaaagttgatgtggtctgc

SEQ ID NO: 48621 - DNA, 20 bp, synthetic construct
  misc_feature 1..20: note = chemically synthesized
  source 1..20: mol_type = other DNA
aagttgatgtggtctgcgag

SEQ ID NO: 48622 - DNA, 20 bp, synthetic construct
  misc_feature 1..20: note = chemically synthesized
  source 1..20: mol_type = other DNA
agttgatgtggtctgcgagt

SEQ ID NO: 48623 - DNA, 20 bp, synthetic construct
  misc_feature 1..20: note = chemically synthesized
  source 1..20: mol_type = other DNA
tgcgagtaggtgctgccatc

SEQ ID NO: 48624 - DNA, 20 bp, synthetic construct
  misc_feature 1..20: note = chemically synthesized
  source 1..20: mol_type = other DNA
gagtaggtgctgccatccag

SEQ ID NO: 48625 - DNA, 20 bp, synthetic construct
  misc_feature 1..20: note = chemically synthesized
  source 1..20: mol_type = other DNA
ctgccatccagtggccgaca

SEQ ID NO: 48626 - DNA, 20 bp, synthetic construct
  misc_feature 1..20: note = chemically synthesized
  source 1..20: mol_type = other DNA
gccatccagtggccgacata

SEQ ID NO: 48627 - DNA, 20 bp, synthetic construct
  misc_feature 1..20: note = chemically synthesized
  source 1..20: mol_type = other DNA
gacatagagatgtcatctct

SEQ ID NO: 48628 - DNA, 20 bp, synthetic construct
  misc_feature 1..20: note = chemically synthesized
  source 1..20: mol_type = other DNA
acatagagatgtcatctctg

SEQ ID NO: 48629 - DNA, 20 bp, synthetic construct
  misc_feature 1..20: note = chemically synthesized
  source 1..20: mol_type = other DNA
catagagatgtcatctctga

SEQ ID NO: 48630 - DNA, 20 bp, synthetic construct
  misc_feature 1..20: note = chemically synthesized
  source 1..20: mol_type = other DNA
agagatgtcatctctgaggg

SEQ ID NO: 48631 - DNA, 20 bp, synthetic construct
  misc_feature 1..20: note = chemically synthesized
  source 1..20: mol_type = other DNA
gagatgtcatctctgagggc

SEQ ID NO: 48632 - DNA, 20 bp, synthetic construct
  misc_feature 1..20: note = chemically synthesized
  source 1..20: mol_type = other DNA
atgtcatctctgagggcagg

SEQ ID NO: 48633 - DNA, 20 bp, synthetic construct
  misc_feature 1..20: note = chemically synthesized
  source 1..20: mol_type = other DNA
tgtcatctctgagggcaggt

SEQ ID NO: 48634 - DNA, 20 bp, synthetic construct
  misc_feature 1..20: note = chemically synthesized
  source 1..20: mol_type = other DNA
ctctgagggcaggtaggcca

SEQ ID NO: 48635 - DNA, 20 bp, synthetic construct
  misc_feature 1..20: note = chemically synthesized
  source 1..20: mol_type = other DNA
tctgagggcaggtaggccac

SEQ ID NO: 48636 - DNA, 20 bp, synthetic construct
  misc_feature 1..20: note = chemically synthesized
  source 1..20: mol_type = other DNA
gcaggtaggccacaggtgac

SEQ ID NO: 48637 - DNA, 20 bp, synthetic construct
  misc_feature 1..20: note = chemically synthesized
  source 1..20: mol_type = other DNA
aggtaggccacaggtgacaa

SEQ ID NO: 48638 - DNA, 20 bp, synthetic construct
  misc_feature 1..20: note = chemically synthesized
  source 1..20: mol_type = other DNA
ggtaggccacaggtgacaag

SEQ ID NO: 48639 - DNA, 20 bp, synthetic construct
  misc_feature 1..20: note = chemically synthesized
  source 1..20: mol_type = other DNA
cacaggtgacaagaggattg

SEQ ID NO: 48640 - DNA, 20 bp, synthetic construct
  misc_feature 1..20: note = chemically synthesized
  source 1..20: mol_type = other DNA
aggattgaagccctccctga

SEQ ID NO: 48641 - DNA, 20 bp, synthetic construct
  misc_feature 1..20: note = chemically synthesized
  source 1..20: mol_type = other DNA
ggattgaagccctccctgat

SEQ ID NO: 48642 - DNA, 20 bp, synthetic construct
  misc_feature 1..20: note = chemically synthesized
  source 1..20: mol_type = other DNA
gattgaagccctccctgatg

SEQ ID NO: 48643 - DNA, 20 bp, synthetic construct
  misc_feature 1..20: note = chemically synthesized
  source 1..20: mol_type = other DNA
agccctccctgatggggcct

SEQ ID NO: 48644 - DNA, 20 bp, synthetic construct
  misc_feature 1..20: note = chemically synthesized
  source 1..20: mol_type = other DNA
gccctccctgatggggcctt

SEQ ID NO: 48645 - DNA, 20 bp, synthetic construct
  misc_feature 1..20: note = chemically synthesized
  source 1..20: mol_type = other DNA
ccctccctgatggggccttg

SEQ ID NO: 48646 - DNA, 20 bp, synthetic construct
  misc_feature 1..20: note = chemically synthesized
  source 1..20: mol_type = other DNA
ctccctgatggggccttggg

SEQ ID NO: 48647 - DNA, 20 bp, synthetic construct
  misc_feature 1..20: note = chemically synthesized
  source 1..20: mol_type = other DNA
ccctgatggggccttgggga

SEQ ID NO: 48648 - DNA, 20 bp, synthetic construct
  misc_feature 1..20: note = chemically synthesized
  source 1..20: mol_type = other DNA
cctgatggggccttggggag

SEQ ID NO: 48649 - DNA, 20 bp, synthetic construct
  misc_feature 1..20: note = chemically synthesized
  source 1..20: mol_type = other DNA
ctgatggggccttggggaga

SEQ ID NO: 48650 - DNA, 20 bp, synthetic construct
  misc_feature 1..20: note = chemically synthesized
  source 1..20: mol_type = other DNA
atggggccttggggagaggg

SEQ ID NO: 48651 - DNA, 20 bp, synthetic construct
  misc_feature 1..20: note = chemically synthesized
  source 1..20: mol_type = other DNA
gggccttggggagagggcag

SEQ ID NO: 48652 - DNA, 20 bp, synthetic construct
  misc_feature 1..20: note = chemically synthesized
  source 1..20: mol_type = other DNA
ggccttggggagagggcagc

SEQ ID NO: 48653 - DNA, 20 bp, synthetic construct
  misc_feature 1..20: note = chemically synthesized
  source 1..20: mol_type = other DNA
gccttggggagagggcagca

SEQ ID NO: 48654 - DNA, 20 bp, synthetic construct
  misc_feature 1..20: note = chemically synthesized
  source 1..20: mol_type = other DNA
tggggagagggcagcagggt

SEQ ID NO: 48655 - DNA, 20 bp, synthetic construct
  misc_feature 1..20: note = chemically synthesized
  source 1..20: mol_type = other DNA
agagggcagcagggtaagtc

SEQ ID NO: 48656 - DNA, 20 bp, synthetic construct
  misc_feature 1..20: note = chemically synthesized
  source 1..20: mol_type = other DNA
gggcagcagggtaagtccag

SEQ ID NO: 48657 - DNA, 20 bp, synthetic construct
  misc_feature 1..20: note = chemically synthesized
  source 1..20: mol_type = other DNA
cagcagggtaagtccagcgg

SEQ ID NO: 48658 - DNA, 20 bp, synthetic construct
  misc_feature 1..20: note = chemically synthesized
  source 1..20: mol_type = other DNA
agcagggtaagtccagcggc

SEQ ID NO: 48659 - DNA, 20 bp, synthetic construct
  misc_feature 1..20: note = chemically synthesized
  source 1..20: mol_type = other DNA
ggtaagtccagcggcaggat

SEQ ID NO: 48660 - DNA, 20 bp, synthetic construct
  misc_feature 1..20: note = chemically synthesized
  source 1..20: mol_type = other DNA
caggatcagtccattgattg

SEQ ID NO: 48661 - DNA, 20 bp, synthetic construct
  misc_feature 1..20: note = chemically synthesized
  source 1..20: mol_type = other DNA
attgtggatgacgactgacc

SEQ ID NO: 48662 - DNA, 20 bp, synthetic construct
  misc_feature 1..20: note = chemically synthesized
  source 1..20: mol_type = other DNA
actgacctggaaaatcccct

SEQ ID NO: 48663 - DNA, 20 bp, synthetic construct
  misc_feature 1..20: note = chemically synthesized
  source 1..20: mol_type = other DNA
ccaaactctgcatttgatcc

SEQ ID NO: 48664 - DNA, 20 bp, synthetic construct
  misc_feature 1..20: note = chemically synthesized
  source 1..20: mol_type = other DNA
actctgcatttgatccaagt

SEQ ID NO: 48665 - DNA, 20 bp, synthetic construct
  misc_feature 1..20: note = chemically synthesized
  source 1..20: mol_type = other DNA
ctctgcatttgatccaagtc

SEQ ID NO: 48666 - DNA, 20 bp, synthetic construct
  misc_feature 1..20: note = chemically synthesized
  source 1..20: mol_type = other DNA
tctgcatttgatccaagtca

SEQ ID NO: 48667 - DNA, 20 bp, synthetic construct
  misc_feature 1..20: note = chemically synthesized
  source 1..20: mol_type = other DNA
gatccaagtcagggaacacc

SEQ ID NO: 48668 - DNA, 20 bp, synthetic construct
  misc_feature 1..20: note = chemically synthesized
  source 1..20: mol_type = other DNA
agggaacacctggaaacatg

SEQ ID NO: 48669 - DNA, 20 bp, synthetic construct
  misc_feature 1..20: note = chemically synthesized
  source 1..20: mol_type = other DNA
gggaacacctggaaacatga

SEQ ID NO: 48670 - DNA, 20 bp, synthetic construct
  misc_feature 1..20: note = chemically synthesized
  source 1..20: mol_type = other DNA
ggaacacctggaaacatgaa

SEQ ID NO: 48671 - DNA, 20 bp, synthetic construct
  misc_feature 1..20: note = chemically synthesized
  source 1..20: mol_type = other DNA
gaacacctggaaacatgaag

SEQ ID NO: 48672 - DNA, 20 bp, synthetic construct
  misc_feature 1..20: note = chemically synthesized
  source 1..20: mol_type = other DNA
acacctggaaacatgaaggg

SEQ ID NO: 48673 - DNA, 20 bp, synthetic construct
  misc_feature 1..20: note = chemically synthesized
  source 1..20: mol_type = other DNA
acctggaaacatgaagggga

SEQ ID NO: 48674 - DNA, 20 bp, synthetic construct
  misc_feature 1..20: note = chemically synthesized
  source 1..20: mol_type = other DNA
tggaaacatgaaggggagag

SEQ ID NO: 48675 - DNA, 20 bp, synthetic construct
  misc_feature 1..20: note = chemically synthesized
  source 1..20: mol_type = other DNA
ggaaacatgaaggggagagc

SEQ ID NO: 48676 - DNA, 20 bp, synthetic construct
  misc_feature 1..20: note = chemically synthesized
  source 1..20: mol_type = other DNA
gaaaactttgacctccctct

SEQ ID NO: 48677 - DNA, 20 bp, synthetic construct
  misc_feature 1..20: note = chemically synthesized
  source 1..20: mol_type = other DNA
aaactttgacctccctctca

SEQ ID NO: 48678 - DNA, 20 bp, synthetic construct
  misc_feature 1..20: note = chemically synthesized
  source 1..20: mol_type = other DNA
aactttgacctccctctcag

SEQ ID NO: 48679 - DNA, 20 bp, synthetic construct
  misc_feature 1..20: note = chemically synthesized
  source 1..20: mol_type = other DNA
tgacctccctctcagaggct

SEQ ID NO: 48680 - DNA, 20 bp, synthetic construct
  misc_feature 1..20: note = chemically synthesized
  source 1..20: mol_type = other DNA
ctgatgtcattattgacatg

SEQ ID NO: 48681 - DNA, 20 bp, synthetic construct
  misc_feature 1..20: note = chemically synthesized
  source 1..20: mol_type = other DNA
acatgtagaaaattgatgaa

SEQ ID NO: 48682 - DNA, 20 bp, synthetic construct
  misc_feature 1..20: note = chemically synthesized
  source 1..20: mol_type = other DNA
catgtagaaaattgatgaac

SEQ ID NO: 48683 - DNA, 20 bp, synthetic construct
  misc_feature 1..20: note = chemically synthesized
  source 1..20: mol_type = other DNA
gaaaattgatgaacaggcct

SEQ ID NO: 48684 - DNA, 20 bp, synthetic construct
  misc_feature 1..20: note = chemically synthesized
  source 1..20: mol_type = other DNA
caggcctgagttatgttttg

SEQ ID NO: 48685 - DNA, 20 bp, synthetic construct
  misc_feature 1..20: note = chemically synthesized
  source 1..20: mol_type = other DNA
ttatgttttgtggcacctca

SEQ ID NO: 48686 - DNA, 20 bp, synthetic construct
  misc_feature 1..20: note = chemically synthesized
  source 1..20: mol_type = other DNA
ttttgtggcacctcatggtc

SEQ ID NO: 48687 - DNA, 20 bp, synthetic construct
  misc_feature 1..20: note = chemically synthesized
  source 1..20: mol_type = other DNA
gtggcacctcatggtctagt

SEQ ID NO: 48688 - DNA, 20 bp, synthetic construct
  misc_feature 1..20: note = chemically synthesized
  source 1..20: mol_type = other DNA
catggtctagttagtgttct

SEQ ID NO: 48689 - DNA, 20 bp, synthetic construct
  misc_feature 1..20: note = chemically synthesized
  source 1..20: mol_type = other DNA
tgttctgagaatcattttct

SEQ ID NO: 48690 - DNA, 20 bp, synthetic construct
  misc_feature 1..20: note = chemically synthesized
  source 1..20: mol_type = other DNA
tctgagaatcattttctcag

SEQ ID NO: 48691 - DNA, 20 bp, synthetic construct
  misc_feature 1..20: note = chemically synthesized
  source 1..20: mol_type = other DNA
tcattttctcagtggacctg

SEQ ID NO: 48692 - DNA, 20 bp, synthetic construct
  misc_feature 1..20: note = chemically synthesized
  source 1..20: mol_type = other DNA
cattttctcagtggacctgc

SEQ ID NO: 48693 - DNA, 20 bp, synthetic construct
  misc_feature 1..20: note = chemically synthesized
  source 1..20: mol_type = other DNA
ttctcagtggacctgcaggt

SEQ ID NO: 48694 - DNA, 20 bp, synthetic construct
  misc_feature 1..20: note = chemically synthesized
  source 1..20: mol_type = other DNA
agtggacctgcaggtgagac

SEQ ID NO: 48695 - DNA, 20 bp, synthetic construct
  misc_feature 1..20: note = chemically synthesized
  source 1..20: mol_type = other DNA
gtggacctgcaggtgagacc

SEQ ID NO: 48696 - DNA, 20 bp, synthetic construct
  misc_feature 1..20: note = chemically synthesized
  source 1..20: mol_type = other DNA
acctgcaggtgagaccaggc

SEQ ID NO: 48697 - DNA, 20 bp, synthetic construct
  misc_feature 1..20: note = chemically synthesized
  source 1..20: mol_type = other DNA
cctgcaggtgagaccaggcg

SEQ ID NO: 48698 - DNA, 20 bp, synthetic construct
  misc_feature 1..20: note = chemically synthesized
  source 1..20: mol_type = other DNA
gcaggtgagaccaggcgagg

SEQ ID NO: 48699 - DNA, 20 bp, synthetic construct
  misc_feature 1..20: note = chemically synthesized
  source 1..20: mol_type = other DNA
ggtgagaccaggcgaggcag

SEQ ID NO: 48700 - DNA, 20 bp, synthetic construct
  misc_feature 1..20: note = chemically synthesized
  source 1..20: mol_type = other DNA
gaccaggcgaggcagaagcc

SEQ ID NO: 48701 - DNA, 20 bp, synthetic construct
  misc_feature 1..20: note = chemically synthesized
  source 1..20: mol_type = other DNA
caggcgaggcagaagcctag

SEQ ID NO: 48702 - DNA, 20 bp, synthetic construct
  misc_feature 1..20: note = chemically synthesized
  source 1..20: mol_type = other DNA
aggcgaggcagaagcctagt

SEQ ID NO: 48703 - DNA, 20 bp, synthetic construct
  misc_feature 1..20: note = chemically synthesized
  source 1..20: mol_type = other DNA
ggcgaggcagaagcctagtg

SEQ ID NO: 48704 - DNA, 20 bp, synthetic construct
  misc_feature 1..20: note = chemically synthesized
  source 1..20: mol_type = other DNA
gcgaggcagaagcctagtgg

SEQ ID NO: 48705 - DNA, 20 bp, synthetic construct
  misc_feature 1..20: note = chemically synthesized
  source 1..20: mol_type = other DNA
ggcagaagcctagtggggga

SEQ ID NO: 48706 - DNA, 20 bp, synthetic construct
  misc_feature 1..20: note = chemically synthesized
  source 1..20: mol_type = other DNA
agaagcctagtgggggatgg

SEQ ID NO: 48707 - DNA, 20 bp, synthetic construct
  misc_feature 1..20: note = chemically synthesized
  source 1..20: mol_type = other DNA
gcctagtgggggatggtggt

SEQ ID NO: 48708 - DNA, 20 bp, synthetic construct
  misc_feature 1..20: note = chemically synthesized
  source 1..20: mol_type = other DNA
ggatggtggttagaaatgtg

SEQ ID NO: 48709 - DNA, 20 bp, synthetic construct
  misc_feature 1..20: note = chemically synthesized
  source 1..20: mol_type = other DNA
ggtggttagaaatgtgtgga

SEQ ID NO: 48710 - DNA, 20 bp, synthetic construct
  misc_feature 1..20: note = chemically synthesized
  source 1..20: mol_type = other DNA
tagaaatgtgtggatggttg

SEQ ID NO: 48711 - DNA, 20 bp, synthetic construct
  misc_feature 1..20: note = chemically synthesized
  source 1..20: mol_type = other DNA
agaaatgtgtggatggttgt

SEQ ID NO: 48712 - DNA, 20 bp, synthetic construct
  misc_feature 1..20: note = chemically synthesized
  source 1..20: mol_type = other DNA
gaaatgtgtggatggttgtg

SEQ ID NO: 48713 - DNA, 20 bp, synthetic construct
  misc_feature 1..20: note = chemically synthesized
  source 1..20: mol_type = other DNA
atgtgtggatggttgtgggg

SEQ ID NO: 48714 - DNA, 20 bp, synthetic construct
  misc_feature 1..20: note = chemically synthesized
  source 1..20: mol_type = other DNA
tgtggatggttgtggggcag

SEQ ID NO: 48715 - DNA, 20 bp, synthetic construct
  misc_feature 1..20: note = chemically synthesized
  source 1..20: mol_type = other DNA
tggttgtggggcagaagaaa

SEQ ID NO: 48716 - DNA, 20 bp, synthetic construct
  misc_feature 1..20: note = chemically synthesized
  source 1..20: mol_type = other DNA
tgtggggcagaagaaacagc

SEQ ID NO: 48717 - DNA, 20 bp, synthetic construct
  misc_feature 1..20: note = chemically synthesized
  source 1..20: mol_type = other DNA
ggggcagaagaaacagcaag

SEQ ID NO: 48718 - DNA, 20 bp, synthetic construct
  misc_feature 1..20: note = chemically synthesized
  source 1..20: mol_type = other DNA
gggcagaagaaacagcaagt

SEQ ID NO: 48719 - DNA, 20 bp, synthetic construct
  misc_feature 1..20: note = chemically synthesized
  source 1..20: mol_type = other DNA
aagaaacagcaagtaggctc

SEQ ID NO: 48720 - DNA, 20 bp, synthetic construct
  misc_feature 1..20: note = chemically synthesized
  source 1..20: mol_type = other DNA
agaaacagcaagtaggctct

SEQ ID NO: 48721 - DNA, 20 bp, synthetic construct
  misc_feature 1..20: note = chemically synthesized
  source 1..20: mol_type = other DNA
acagcaagtaggctctgggc

SEQ ID NO: 48722 - DNA, 20 bp, synthetic construct
  misc_feature 1..20: note = chemically synthesized
  source 1..20: mol_type = other DNA
gctctgggccagctacaaac

SEQ ID NO: 48723 - DNA, 20 bp, synthetic construct
  misc_feature 1..20: note = chemically synthesized
  source 1..20: mol_type = other DNA
atgatgtctactgatgatga

SEQ ID NO: 48724 - DNA, 20 bp, synthetic construct
  misc_feature 1..20: note = chemically synthesized
  source 1..20: mol_type = other DNA
tctactgatgatgatagtga

SEQ ID NO: 48725 - DNA, 20 bp, synthetic construct
  misc_feature 1..20: note = chemically synthesized
  source 1..20: mol_type = other DNA
actgatgatgatagtgatgg

SEQ ID NO: 48726 - DNA, 20 bp, synthetic construct
  misc_feature 1..20: note = chemically synthesized
  source 1..20: mol_type = other DNA
gatgatgatagtgatggtgg

SEQ ID NO: 48727 - DNA, 20 bp, synthetic construct
  misc_feature 1..20: note = chemically synthesized
  source 1..20: mol_type = other DNA
gatgatagtgatggtggtgg

SEQ ID NO: 48728 - DNA, 20 bp, synthetic construct
  misc_feature 1..20: note = chemically synthesized
  source 1..20: mol_type = other DNA
gatagtgatggtggtggtgg

SEQ ID NO: 48729 - DNA, 20 bp, synthetic construct
  misc_feature 1..20: note = chemically synthesized
  source 1..20: mol_type = other DNA
gatggtggtggtggtggtga

SEQ ID NO: 48730 - DNA, 20 bp, synthetic construct
  misc_feature 1..20: note = chemically synthesized
  source 1..20: mol_type = other DNA
ggtggtggtggtggtgatgg

SEQ ID NO: 48731 - DNA, 20 bp, synthetic construct
  misc_feature 1..20: note = chemically synthesized
  source 1..20: mol_type = other DNA
ggtggtggtggtgatggtgg

SEQ ID NO: 48732 - DNA, 20 bp, synthetic construct
  misc_feature 1..20: note = chemically synthesized
  source 1..20: mol_type = other DNA
ggtggtggtgatggtggtgg

SEQ ID NO: 48733 - DNA, 20 bp, synthetic construct
  misc_feature 1..20: note = chemically synthesized
  source 1..20: mol_type = other DNA
ggtggtggtaataattgtga

SEQ ID NO: 48734 - DNA, 20 bp, synthetic construct
  misc_feature 1..20: note = chemically synthesized
  source 1..20: mol_type = other DNA
ggtggtaataattgtgatgg

SEQ ID NO: 48735 - DNA, 20 bp, synthetic construct
  misc_feature 1..20: note = chemically synthesized
  source 1..20: mol_type = other DNA
ggtaataattgtgatggtgg

SEQ ID NO: 48736 - DNA, 20 bp, synthetic construct
  misc_feature 1..20: note = chemically synthesized
  source 1..20: mol_type = other DNA
tggtggtggaatgatgatga

SEQ ID NO: 48737 - DNA, 20 bp, synthetic construct
  misc_feature 1..20: note = chemically synthesized
  source 1..20: mol_type = other DNA
tggtggaatgatgatgatgg

SEQ ID NO: 48738 - DNA, 20 bp, synthetic construct
  misc_feature 1..20: note = chemically synthesized
  source 1..20: mol_type = other DNA
tggaatgatgatgatggtgg

SEQ ID NO: 48739 - DNA, 20 bp, synthetic construct
  misc_feature 1..20: note = chemically synthesized
  source 1..20: mol_type = other DNA
aatgatgatgatggtggtgg

SEQ ID NO: 48740 - DNA, 20 bp, synthetic construct
  misc_feature 1..20: note = chemically synthesized
  source 1..20: mol_type = other DNA
atgatgatgatggtggtggt

SEQ ID NO: 48741 - DNA, 20 bp, synthetic construct
  misc_feature 1..20: note = chemically synthesized
  source 1..20: mol_type = other DNA
atgatgatggtggtggtggg

SEQ ID NO: 48742 - DNA, 20 bp, synthetic construct
  misc_feature 1..20: note = chemically synthesized
  source 1..20: mol_type = other DNA
gtggtggtgggtagtaatga

SEQ ID NO: 48743 - DNA, 20 bp, synthetic construct
  misc_feature 1..20: note = chemically synthesized
  source 1..20: mol_type = other DNA
gtgggtagtaatgatggtgt

SEQ ID NO: 48744 - DNA, 20 bp, synthetic construct
  misc_feature 1..20: note = chemically synthesized
  source 1..20: mol_type = other DNA
agtaatgatggtgttggtga

SEQ ID NO: 48745 - DNA, 20 bp, synthetic construct
  misc_feature 1..20: note = chemically synthesized
  source 1..20: mol_type = other DNA
aatgatggtgttggtgatgg

SEQ ID NO: 48746 - DNA, 20 bp, synthetic construct
  misc_feature 1..20: note = chemically synthesized
  source 1..20: mol_type = other DNA
gatggtgttggtgatggtgg

SEQ ID NO: 48747 - DNA, 20 bp, synthetic construct
  misc_feature 1..20: note = chemically synthesized
  source 1..20: mol_type = other DNA
ggtgttggtgatggtggtag

SEQ ID NO: 48748 - DNA, 20 bp, synthetic construct
  misc_feature 1..20: note = chemically synthesized
  source 1..20: mol_type = other DNA
ggtgatggtggtagtggtcg

SEQ ID NO: 48749 - DNA, 20 bp, synthetic construct
  misc_feature 1..20: note = chemically synthesized
  source 1..20: mol_type = other DNA
ggtggtagtggtcgtggtga

SEQ ID NO: 48750 - DNA, 20 bp, synthetic construct
  misc_feature 1..20: note = chemically synthesized
  source 1..20: mol_type = other DNA
agtggtcgtggtgatggtga

SEQ ID NO: 48751 - DNA, 20 bp, synthetic construct
  misc_feature 1..20: note = chemically synthesized
  source 1..20: mol_type = other DNA
cgtggtgatggtgatagtga

SEQ ID NO: 48752 - DNA, 20 bp, synthetic construct
  misc_feature 1..20: note = chemically synthesized
  source 1..20: mol_type = other DNA
gatggtgatagtgatagtga

SEQ ID NO: 48753 - DNA, 20 bp, synthetic construct
  misc_feature 1..20: note = chemically synthesized
  source 1..20: mol_type = other DNA
ggtgatagtgatagtgatgg

SEQ ID NO: 48754 - DNA, 20 bp, synthetic construct
  misc_feature 1..20: note = chemically synthesized
  source 1..20: mol_type = other DNA
gatagtgatagtgatggtgg

SEQ ID NO: 48755 - DNA, 20 bp, synthetic construct
  misc_feature 1..20: note = chemically synthesized
  source 1..20: mol_type = other DNA
ggtggtaatgataatgctaa

SEQ ID NO: 48756 - DNA, 20 bp, synthetic construct
  misc_feature 1..20: note = chemically synthesized
  source 1..20: mol_type = other DNA
ggtaatgataatgctaatgg

SEQ ID NO: 48757 - DNA, 20 bp, synthetic construct
  misc_feature 1..20: note = chemically synthesized
  source 1..20: mol_type = other DNA
aatgataatgctaatggtgg

SEQ ID NO: 48758 - DNA, 20 bp, synthetic construct
  misc_feature 1..20: note = chemically synthesized
  source 1..20: mol_type = other DNA
gataatgattatcatgatga

SEQ ID NO: 48759 - DNA, 20 bp, synthetic construct
  misc_feature 1..20: note = chemically synthesized
  source 1..20: mol_type = other DNA
aatgattatcatgatgatag

SEQ ID NO: 48760 - DNA, 20 bp, synthetic construct
  misc_feature 1..20: note = chemically synthesized
  source 1..20: mol_type = other DNA
gattatcatgatgatagcgg

SEQ ID NO: 48761 - DNA, 20 bp, synthetic construct
  misc_feature 1..20: note = chemically synthesized
  source 1..20: mol_type = other DNA
catgatgatagcggtggtga

SEQ ID NO: 48762 - DNA, 20 bp, synthetic construct
  misc_feature 1..20: note = chemically synthesized
  source 1..20: mol_type = other DNA
gatagcggtggtgatggtga

SEQ ID NO: 48763 - DNA, 20 bp, synthetic construct
  misc_feature 1..20: note = chemically synthesized
  source 1..20: mol_type = other DNA
gatggtgatggtgatgataa

SEQ ID NO: 48764 - DNA, 20 bp, synthetic construct
  misc_feature 1..20: note = chemically synthesized
  source 1..20: mol_type = other DNA
gatggtgatgataatggtga

SEQ ID NO: 48765 - DNA, 20 bp, synthetic construct
  misc_feature 1..20: note = chemically synthesized
  source 1..20: mol_type = other DNA
ggtgatgataatggtgatgg

SEQ ID NO: 48766 - DNA, 20 bp, synthetic construct
  misc_feature 1..20: note = chemically synthesized
  source 1..20: mol_type = other DNA
gatgataatggtgatggtgg

SEQ ID NO: 48767 - DNA, 20 bp, synthetic construct
  misc_feature 1..20: note = chemically synthesized
  source 1..20: mol_type = other DNA
tggtggtagaatgatgatga

SEQ ID NO: 48768 - DNA, 20 bp, synthetic construct
  misc_feature 1..20: note = chemically synthesized
  source 1..20: mol_type = other DNA
tagaatgatgatgatggtga

SEQ ID NO: 48769 - DNA, 20 bp, synthetic construct
  misc_feature 1..20: note = chemically synthesized
  source 1..20: mol_type = other DNA
aatgatgatgatggtgatgg

SEQ ID NO: 48770 - DNA, 20 bp, synthetic construct
  misc_feature 1..20: note = chemically synthesized
  source 1..20: mol_type = other DNA
gatgatgatggtgatggtgg

SEQ ID NO: 48771 - DNA, 20 bp, synthetic construct
  misc_feature 1..20: note = chemically synthesized
  source 1..20: mol_type = other DNA
gatgatggtgatggtggtgg

SEQ ID NO: 48772 - DNA, 20 bp, synthetic construct
  misc_feature 1..20: note = chemically synthesized
  source 1..20: mol_type = other DNA
gatggtgatggtggtggtgg

SEQ ID NO: 48773 - DNA, 20 bp, synthetic construct
  misc_feature 1..20: note = chemically synthesized
  source 1..20: mol_type = other DNA
ggtgatggtggtggtggtgg

SEQ ID NO: 48774 - DNA, 20 bp, synthetic construct
  misc_feature 1..20: note = chemically synthesized
  source 1..20: mol_type = other DNA
ggtggtggtagtaatgatga

SEQ ID NO: 48775 - DNA, 20 bp, synthetic construct
  misc_feature 1..20: note = chemically synthesized
  source 1..20: mol_type = other DNA
ggtggtagtaatgatgatgg

SEQ ID NO: 48776 - DNA, 20 bp, synthetic construct
  misc_feature 1..20: note = chemically synthesized
  source 1..20: mol_type = other DNA
ggtagtaatgatgatggtgg

SEQ ID NO: 48777 - DNA, 20 bp, synthetic construct
  misc_feature 1..20: note = chemically synthesized
  source 1..20: mol_type = other DNA
atggtggtggtgatgatgtt

SEQ ID NO: 48778 - DNA, 20 bp, synthetic construct
  misc_feature 1..20: note = chemically synthesized
  source 1..20: mol_type = other DNA
tggtggtggtgatgatgttg

SEQ ID NO: 48779 - DNA, 20 bp, synthetic construct
  misc_feature 1..20: note = chemically synthesized
  source 1..20: mol_type = other DNA
ggtggtggtgatgatgttga

SEQ ID NO: 48780 - DNA, 20 bp, synthetic construct
  misc_feature 1..20: note = chemically synthesized
  source 1..20: mol_type = other DNA
gatgttgagggtgatgataa

SEQ ID NO: 48781 - DNA, 20 bp, synthetic construct
  misc_feature 1..20: note = chemically synthesized
  source 1..20: mol_type = other DNA
gagggtgatgataatagtga

SEQ ID NO: 48782 - DNA, 20 bp, synthetic construct
  misc_feature 1..20: note = chemically synthesized
  source 1..20: mol_type = other DNA
ggtgatgataatagtgacag

SEQ ID NO: 48783 - DNA, 20 bp, synthetic construct
  misc_feature 1..20: note = chemically synthesized
  source 1..20: mol_type = other DNA
gatgataatagtgacagtgg

SEQ ID NO: 48784 - DNA, 20 bp, synthetic construct
  misc_feature 1..20: note = chemically synthesized
  source 1..20: mol_type = other DNA
gataatagtgacagtggtgg

SEQ ID NO: 48785 - DNA, 20 bp, synthetic construct
  misc_feature 1..20: note = chemically synthesized
  source 1..20: mol_type = other DNA
agtggtggtggtaatgataa

SEQ ID NO: 48786 - DNA, 20 bp, synthetic construct
  misc_feature 1..20: note = chemically synthesized
  source 1..20: mol_type = other DNA
ggtggtaatgataatggtga

SEQ ID NO: 48787 - DNA, 20 bp, synthetic construct
  misc_feature 1..20: note = chemically synthesized
  source 1..20: mol_type = other DNA
ggtaatgataatggtgatgg

SEQ ID NO: 48788 - DNA, 20 bp, synthetic construct
  misc_feature 1..20: note = chemically synthesized
  source 1..20: mol_type = other DNA
taatggtgatggtggaatga

SEQ ID NO: 48789 - DNA, 20 bp, synthetic construct
  misc_feature 1..20: note = chemically synthesized
  source 1..20: mol_type = other DNA
tgatggtggaatgatggtga

SEQ ID NO: 48790 - DNA, 20 bp, synthetic construct
  misc_feature 1..20: note = chemically synthesized
  source 1..20: mol_type = other DNA
tggtggaatgatggtgatgg

SEQ ID NO: 48791 - DNA, 20 bp, synthetic construct
  misc_feature 1..20: note = chemically synthesized
  source 1..20: mol_type = other DNA
tggaatgatggtgatggtgg

SEQ ID NO: 48792 - DNA, 20 bp, synthetic construct
  misc_feature 1..20: note = chemically synthesized
  source 1..20: mol_type = other DNA
tgatggtggtggaatgatga

SEQ ID NO: 48793 - DNA, 20 bp, synthetic construct
  misc_feature 1..20: note = chemically synthesized
  source 1..20: mol_type = other DNA
tggtggtggaatgatgatgg

SEQ ID NO: 48794 - DNA, 20 bp, synthetic construct
  misc_feature 1..20: note = chemically synthesized
  source 1..20: mol_type = other DNA
ggaatgatgatggtggtgct

SEQ ID NO: 48795 - DNA, 20 bp, synthetic construct
  misc_feature 1..20: note = chemically synthesized
  source 1..20: mol_type = other DNA
atgatgatggtggtgctgag

SEQ ID NO: 48796 - DNA, 20 bp, synthetic construct
  misc_feature 1..20: note = chemically synthesized
  source 1..20: mol_type = other DNA
gtggtgctgagtagtaatga

SEQ ID NO: 48797 - DNA, 20 bp, synthetic construct
  misc_feature 1..20: note = chemically synthesized
  source 1..20: mol_type = other DNA
ctgagtagtaatgatggtga

SEQ ID NO: 48798 - DNA, 20 bp, synthetic construct
  misc_feature 1..20: note = chemically synthesized
  source 1..20: mol_type = other DNA
agtagtaatgatggtgatgg

SEQ ID NO: 48799 - DNA, 20 bp, synthetic construct
  misc_feature 1..20: note = chemically synthesized
  source 1..20: mol_type = other DNA
agtaatgatggtgatggtgg

SEQ ID NO: 48800 - DNA, 20 bp, synthetic construct
  misc_feature 1..20: note = chemically synthesized
  source 1..20: mol_type = other DNA
aatgatggtgatggtggtgg

SEQ ID NO: 48801 - DNA, 20 bp, synthetic construct
  misc_feature 1..20: note = chemically synthesized
  source 1..20: mol_type = other DNA
ggtgatggtggtggtggctg

SEQ ID NO: 48802 - DNA, 20 bp, synthetic construct
  misc_feature 1..20: note = chemically synthesized
  source 1..20: mol_type = other DNA
ggtggtggctgtggtgatga

SEQ ID NO: 48803 - DNA, 20 bp, synthetic construct
  misc_feature 1..20: note = chemically synthesized
  source 1..20: mol_type = other DNA
ggtggctgtggtgatgatgg

SEQ ID NO: 48804 - DNA, 20 bp, synthetic construct
  misc_feature 1..20: note = chemically synthesized
  source 1..20: mol_type = other DNA
ggctgtggtgatgatggtgg

SEQ ID NO: 48805 - DNA, 20 bp, synthetic construct
  misc_feature 1..20: note = chemically synthesized
  source 1..20: mol_type = other DNA
tgtggtgatgatggtggtgg

SEQ ID NO: 48806 - DNA, 20 bp, synthetic construct
  misc_feature 1..20: note = chemically synthesized
  source 1..20: mol_type = other DNA
ggtgatgatggtggtggtag

SEQ ID NO: 48807 - DNA, 20 bp, synthetic construct
  misc_feature 1..20: note = chemically synthesized
  source 1..20: mol_type = other DNA
gatgatggtggtggtagtgg

SEQ ID NO: 48808 - DNA, 20 bp, synthetic construct
  misc_feature 1..20: note = chemically synthesized
  source 1..20: mol_type = other DNA
ggtagtggtagtaacgatga

SEQ ID NO: 48809 - DNA, 20 bp, synthetic construct
  misc_feature 1..20: note = chemically synthesized
  source 1..20: mol_type = other DNA
agtggtagtaacgatgatgg

SEQ ID NO: 48810 - DNA, 20 bp, synthetic construct
  misc_feature 1..20: note = chemically synthesized
  source 1..20: mol_type = other DNA
ggtagtaacgatgatggtgg

SEQ ID NO: 48811 - DNA, 20 bp, synthetic construct
  misc_feature 1..20: note = chemically synthesized
  source 1..20: mol_type = other DNA
gatgatggtggtggtgatga

SEQ ID NO: 48812 - DNA, 20 bp, synthetic construct
  misc_feature 1..20: note = chemically synthesized
  source 1..20: mol_type = other DNA
ggtggtgatgatagtgatga

SEQ ID NO: 48813 - DNA, 20 bp, synthetic construct
  misc_feature 1..20: note = chemically synthesized
  source 1..20: mol_type = other DNA
gtgatgatggtgatgatgtt

SEQ ID NO: 48814 - DNA, 20 bp, synthetic construct
  misc_feature 1..20: note = chemically synthesized
  source 1..20: mol_type = other DNA
tgatgatggtgatgatgttg

SEQ ID NO: 48815 - DNA, 20 bp, synthetic construct
  misc_feature 1..20: note = chemically synthesized
  source 1..20: mol_type = other DNA
gatgatggtgatgatgttga

SEQ ID NO: 48816 - DNA, 20 bp, synthetic construct
  misc_feature 1..20: note = chemically synthesized
  source 1..20: mol_type = other DNA
gatgttgagggtgatgataa

SEQ ID NO: 48817 - DNA, 20 bp, synthetic construct
  misc_feature 1..20: note = chemically synthesized
  source 1..20: mol_type = other DNA
gagggtgatgataatagtga

SEQ ID NO: 48818 - DNA, 20 bp, synthetic construct
  misc_feature 1..20: note = chemically synthesized
  source 1..20: mol_type = other DNA
ggtgatgataatagtgatag

SEQ ID NO: 48819 - DNA, 20 bp, synthetic construct
  misc_feature 1..20: note = chemically synthesized
  source 1..20: mol_type = other DNA
gatgataatagtgatagcgg

SEQ ID NO: 48820 - DNA, 20 bp, synthetic construct
  misc_feature 1..20: note = chemically synthesized
  source 1..20: mol_type = other DNA
taccaccaccatcatcacca

SEQ ID NO: 48821 - DNA, 20 bp, synthetic construct
  misc_feature 1..20: note = chemically synthesized
  source 1..20: mol_type = other DNA
ccatcaccatcattactact

SEQ ID NO: 48822 - DNA, 20 bp, synthetic construct
  misc_feature 1..20: note = chemically synthesized
  source 1..20: mol_type = other DNA
attatcattaccaccaccat

SEQ ID NO: 48823 - DNA, 20 bp, synthetic construct
  misc_feature 1..20: note = chemically synthesized
  source 1..20: mol_type = other DNA
accaccatcactatcatcat

SEQ ID NO: 48824 - DNA, 20 bp, synthetic construct
  misc_feature 1..20: note = chemically synthesized
  source 1..20: mol_type = other DNA
accatcactatcatcatcag

SEQ ID NO: 48825 - DNA, 20 bp, synthetic construct
  misc_feature 1..20: note = chemically synthesized
  source 1..20: mol_type = other DNA
atcagtagacatcatataac

SEQ ID NO: 48826 - DNA, 20 bp, synthetic construct
  misc_feature 1..20: note = chemically synthesized
  source 1..20: mol_type = other DNA
gacatcatataaccagtttg

SEQ ID NO: 48827 - DNA, 20 bp, synthetic construct
  misc_feature 1..20: note = chemically synthesized
  source 1..20: mol_type = other DNA
tcatataaccagtttgtagc

SEQ ID NO: 48828 - DNA, 20 bp, synthetic construct
  misc_feature 1..20: note = chemically synthesized
  source 1..20: mol_type = other DNA
taaccagtttgtagctggcc

SEQ ID NO: 48829 - DNA, 20 bp, synthetic construct
  misc_feature 1..20: note = chemically synthesized
  source 1..20: mol_type = other DNA
accagtttgtagctggccca

SEQ ID NO: 48830 - DNA, 20 bp, synthetic construct
  misc_feature 1..20: note = chemically synthesized
  source 1..20: mol_type = other DNA
ttctaaccaccatcccccac

SEQ ID NO: 48831 - DNA, 20 bp, synthetic construct
  misc_feature 1..20: note = chemically synthesized
  source 1..20: mol_type = other DNA
tctaaccaccatcccccact

SEQ ID NO: 48832 - DNA, 20 bp, synthetic construct
  misc_feature 1..20: note = chemically synthesized
  source 1..20: mol_type = other DNA
cactaggcttctgcctcgcc

SEQ ID NO: 48833 - DNA, 20 bp, synthetic construct
  misc_feature 1..20: note = chemically synthesized
  source 1..20: mol_type = other DNA
gcctcgcctggtctcacctg

SEQ ID NO: 48834 - DNA, 20 bp, synthetic construct
  misc_feature 1..20: note = chemically synthesized
  source 1..20: mol_type = other DNA
cctcgcctggtctcacctgc

SEQ ID NO: 48835 - DNA, 20 bp, synthetic construct
  misc_feature 1..20: note = chemically synthesized
  source 1..20: mol_type = other DNA
gtctcacctgcaggtccact

SEQ ID NO: 48836 - DNA, 20 bp, synthetic construct
  misc_feature 1..20: note = chemically synthesized
  source 1..20: mol_type = other DNA
tccactgagaaaatgattct

SEQ ID NO: 48837 - DNA, 20 bp, synthetic construct
  misc_feature 1..20: note = chemically synthesized
  source 1..20: mol_type = other DNA
atgattctcagaacactaac

SEQ ID NO: 48838 - DNA, 20 bp, synthetic construct
  misc_feature 1..20: note = chemically synthesized
  source 1..20: mol_type = other DNA
cagaacactaactagaccat

SEQ ID NO: 48839 - DNA, 20 bp, synthetic construct
  misc_feature 1..20: note = chemically synthesized
  source 1..20: mol_type = other DNA
agaacactaactagaccatg

SEQ ID NO: 48840 - DNA, 20 bp, synthetic construct
  misc_feature 1..20: note = chemically synthesized
  source 1..20: mol_type = other DNA
aggtgccacaaaacataact

SEQ ID NO: 48841 - DNA, 20 bp, synthetic construct
  misc_feature 1..20: note = chemically synthesized
  source 1..20: mol_type = other DNA
ggtgccacaaaacataactc

SEQ ID NO: 48842 - DNA, 20 bp, synthetic construct
  misc_feature 1..20: note = chemically synthesized
  source 1..20: mol_type = other DNA
ctacatgtcaataatgacat

SEQ ID NO: 48843 - DNA, 20 bp, synthetic construct
  misc_feature 1..20: note = chemically synthesized
  source 1..20: mol_type = other DNA
tacatgtcaataatgacatc

SEQ ID NO: 48844 - DNA, 20 bp, synthetic construct
  misc_feature 1..20: note = chemically synthesized
  source 1..20: mol_type = other DNA
aataatgacatcaggtcaat

SEQ ID NO: 48845 - DNA, 20 bp, synthetic construct
  misc_feature 1..20: note = chemically synthesized
  source 1..20: mol_type = other DNA
atcaggtcaattggcgttct

SEQ ID NO: 48846 - DNA, 20 bp, synthetic construct
  misc_feature 1..20: note = chemically synthesized
  source 1..20: mol_type = other DNA
aattggcgttctcagcctct

SEQ ID NO: 48847 - DNA, 20 bp, synthetic construct
  misc_feature 1..20: note = chemically synthesized
  source 1..20: mol_type = other DNA
ttggcgttctcagcctctga

SEQ ID NO: 48848 - DNA, 20 bp, synthetic construct
  misc_feature 1..20: note = chemically synthesized
  source 1..20: mol_type = other DNA
tggcgttctcagcctctgag

SEQ ID NO: 48849 - DNA, 20 bp, synthetic construct
  misc_feature 1..20: note = chemically synthesized
  source 1..20: mol_type = other DNA
ggcgttctcagcctctgaga

SEQ ID NO: 48850 - DNA, 20 bp, synthetic construct
  misc_feature 1..20: note = chemically synthesized
  source 1..20: mol_type = other DNA
cgttctcagcctctgagagg

SEQ ID NO: 48851 - DNA, 20 bp, synthetic construct
  misc_feature 1..20: note = chemically synthesized
  source 1..20: mol_type = other DNA
gttctcagcctctgagaggg

SEQ ID NO: 48852 - DNA, 20 bp, synthetic construct
  misc_feature 1..20: note = chemically synthesized
  source 1..20: mol_type = other DNA
agcctctgagagggaggtca

SEQ ID NO: 48853 - DNA, 20 bp, synthetic construct
  misc_feature 1..20: note = chemically synthesized
  source 1..20: mol_type = other DNA
tgctctccccttcatgtttc

SEQ ID NO: 48854 - DNA, 20 bp, synthetic construct
  misc_feature 1..20: note = chemically synthesized
  source 1..20: mol_type = other DNA
gctctccccttcatgtttcc

SEQ ID NO: 48855 - DNA, 20 bp, synthetic construct
  misc_feature 1..20: note = chemically synthesized
  source 1..20: mol_type = other DNA
tttccaggtgttccctgact

SEQ ID NO: 48856 - DNA, 20 bp, synthetic construct
  misc_feature 1..20: note = chemically synthesized
  source 1..20: mol_type = other DNA
tccctgacttggatcaaatg

SEQ ID NO: 48857 - DNA, 20 bp, synthetic construct
  misc_feature 1..20: note = chemically synthesized
  source 1..20: mol_type = other DNA
cctgacttggatcaaatgca

SEQ ID NO: 48858 - DNA, 20 bp, synthetic construct
  misc_feature 1..20: note = chemically synthesized
  source 1..20: mol_type = other DNA
cttggatcaaatgcagagtt

SEQ ID NO: 48859 - DNA, 20 bp, synthetic construct
  misc_feature 1..20: note = chemically synthesized
  source 1..20: mol_type = other DNA
tggatcaaatgcagagtttg

SEQ ID NO: 48860 - DNA, 20 bp, synthetic construct
  misc_feature 1..20: note = chemically synthesized
  source 1..20: mol_type = other DNA
ggatcaaatgcagagtttgg

SEQ ID NO: 48861 - DNA, 20 bp, synthetic construct
  misc_feature 1..20: note = chemically synthesized
  source 1..20: mol_type = other DNA
atgcagagtttggaggtgtt

SEQ ID NO: 48862 - DNA, 20 bp, synthetic construct
  misc_feature 1..20: note = chemically synthesized
  source 1..20: mol_type = other DNA
tgcagagtttggaggtgttg

SEQ ID NO: 48863 - DNA, 20 bp, synthetic construct
  misc_feature 1..20: note = chemically synthesized
  source 1..20: mol_type = other DNA
agtttggaggtgttgaggcc

SEQ ID NO: 48864 - DNA, 20 bp, synthetic construct
  misc_feature 1..20: note = chemically synthesized
  source 1..20: mol_type = other DNA
gtttggaggtgttgaggcca

SEQ ID NO: 48865 - DNA, 20 bp, synthetic construct
  misc_feature 1..20: note = chemically synthesized
  source 1..20: mol_type = other DNA
tttggaggtgttgaggccaa

SEQ ID NO: 48866 - DNA, 20 bp, synthetic construct
  misc_feature 1..20: note = chemically synthesized
  source 1..20: mol_type = other DNA
ttggaggtgttgaggccaag

SEQ ID NO: 48867 - DNA, 20 bp, synthetic construct
  misc_feature 1..20: note = chemically synthesized
  source 1..20: mol_type = other DNA
ttgaggccaaggggattttc

SEQ ID NO: 48868 - DNA, 20 bp, synthetic construct
  misc_feature 1..20: note = chemically synthesized
  source 1..20: mol_type = other DNA
tgaggccaaggggattttcc

SEQ ID NO: 48869 - DNA, 20 bp, synthetic construct
  misc_feature 1..20: note = chemically synthesized
  source 1..20: mol_type = other DNA
gccaaggggattttccaggt

SEQ ID NO: 48870 - DNA, 20 bp, synthetic construct
  misc_feature 1..20: note = chemically synthesized
  source 1..20: mol_type = other DNA
cagtcgtcatccacaatcaa

SEQ ID NO: 48871 - DNA, 20 bp, synthetic construct
  misc_feature 1..20: note = chemically synthesized
  source 1..20: mol_type = other DNA
caatggactgatcctgccgc

SEQ ID NO: 48872 - DNA, 20 bp, synthetic construct
  misc_feature 1..20: note = chemically synthesized
  source 1..20: mol_type = other DNA
taccctgctgccctctcccc

SEQ ID NO: 48873 - DNA, 20 bp, synthetic construct
  misc_feature 1..20: note = chemically synthesized
  source 1..20: mol_type = other DNA
accctgctgccctctcccca

SEQ ID NO: 48874 - DNA, 20 bp, synthetic construct
  misc_feature 1..20: note = chemically synthesized
  source 1..20: mol_type = other DNA
ccctctccccaaggccccat

SEQ ID NO: 48875 - DNA, 20 bp, synthetic construct
  misc_feature 1..20: note = chemically synthesized
  source 1..20: mol_type = other DNA
cctctccccaaggccccatc

SEQ ID NO: 48876 - DNA, 20 bp, synthetic construct
  misc_feature 1..20: note = chemically synthesized
  source 1..20: mol_type = other DNA
ctctccccaaggccccatca

SEQ ID NO: 48877 - DNA, 20 bp, synthetic construct
  misc_feature 1..20: note = chemically synthesized
  source 1..20: mol_type = other DNA
ctccccaaggccccatcagg

SEQ ID NO: 48878 - DNA, 20 bp, synthetic construct
  misc_feature 1..20: note = chemically synthesized
  source 1..20: mol_type = other DNA
tccccaaggccccatcaggg

SEQ ID NO: 48879 - DNA, 20 bp, synthetic construct
  misc_feature 1..20: note = chemically synthesized
  source 1..20: mol_type = other DNA
ccccaaggccccatcaggga

SEQ ID NO: 48880 - DNA, 20 bp, synthetic construct
  misc_feature 1..20: note = chemically synthesized
  source 1..20: mol_type = other DNA
ttcaatcctcttgtcacctg

SEQ ID NO: 48881 - DNA, 20 bp, synthetic construct
  misc_feature 1..20: note = chemically synthesized
  source 1..20: mol_type = other DNA
acctgtggcctacctgccct

SEQ ID NO: 48882 - DNA, 20 bp, synthetic construct
  misc_feature 1..20: note = chemically synthesized
  source 1..20: mol_type = other DNA
ctgtggcctacctgccctca

SEQ ID NO: 48883 - DNA, 20 bp, synthetic construct
  misc_feature 1..20: note = chemically synthesized
  source 1..20: mol_type = other DNA
cagagatgacatctctatgt

SEQ ID NO: 48884 - DNA, 20 bp, synthetic construct
  misc_feature 1..20: note = chemically synthesized
  source 1..20: mol_type = other DNA
gacatctctatgtcggccac

SEQ ID NO: 48885 - DNA, 20 bp, synthetic construct
  misc_feature 1..20: note = chemically synthesized
  source 1..20: mol_type = other DNA
tctctatgtcggccactgga

SEQ ID NO: 48886 - DNA, 20 bp, synthetic construct
  misc_feature 1..20: note = chemically synthesized
  source 1..20: mol_type = other DNA
ctatgtcggccactggatgg

SEQ ID NO: 48887 - DNA, 20 bp, synthetic construct
  misc_feature 1..20: note = chemically synthesized
  source 1..20: mol_type = other DNA
tggatggcagcacctactcg

SEQ ID NO: 48888 - DNA, 20 bp, synthetic construct
  misc_feature 1..20: note = chemically synthesized
  source 1..20: mol_type = other DNA
gcagaccacatcaactttcc

SEQ ID NO: 48889 - DNA, 20 bp, synthetic construct
  misc_feature 1..20: note = chemically synthesized
  source 1..20: mol_type = other DNA
tcaactttcctggcaacttg

SEQ ID NO: 48890 - DNA, 20 bp, synthetic construct
  misc_feature 1..20: note = chemically synthesized
  source 1..20: mol_type = other DNA
actttcctggcaacttgcgg

SEQ ID NO: 48891 - DNA, 20 bp, synthetic construct
  misc_feature 1..20: note = chemically synthesized
  source 1..20: mol_type = other DNA
ctttcctggcaacttgcggt

SEQ ID NO: 48892 - DNA, 20 bp, synthetic construct
  misc_feature 1..20: note = chemically synthesized
  source 1..20: mol_type = other DNA
cggtaggttttcaccattat

SEQ ID NO: 48893 - DNA, 20 bp, synthetic construct
  misc_feature 1..20: note = chemically synthesized
  source 1..20: mol_type = other DNA
ggtaggttttcaccattatc

SEQ ID NO: 48894 - DNA, 20 bp, synthetic construct
  misc_feature 1..20: note = chemically synthesized
  source 1..20: mol_type = other DNA
ggatgtttgccttgctcaaa

SEQ ID NO: 48895 - DNA, 20 bp, synthetic construct
  misc_feature 1..20: note = chemically synthesized
  source 1..20: mol_type = other DNA
tgtttgccttgctcaaatag

SEQ ID NO: 48896 - DNA, 20 bp, synthetic construct
  misc_feature 1..20: note = chemically synthesized
  source 1..20: mol_type = other DNA
cttgctcaaatagcagattc

SEQ ID NO: 48897 - DNA, 20 bp, synthetic construct
  misc_feature 1..20: note = chemically synthesized
  source 1..20: mol_type = other DNA
tgctcaaatagcagattcta

SEQ ID NO: 48898 - DNA, 20 bp, synthetic construct
  misc_feature 1..20: note = chemically synthesized
  source 1..20: mol_type = other DNA
aaatagcagattctagagaa

SEQ ID NO: 48899 - DNA, 20 bp, synthetic construct
  misc_feature 1..20: note = chemically synthesized
  source 1..20: mol_type = other DNA
tgctccctcacacaactatg

SEQ ID NO: 48900 - DNA, 20 bp, synthetic construct
  misc_feature 1..20: note = chemically synthesized
  source 1..20: mol_type = other DNA
cctcacacaactatgtagtc

SEQ ID NO: 48901 - DNA, 20 bp, synthetic construct
  misc_feature 1..20: note = chemically synthesized
  source 1..20: mol_type = other DNA
ctcacacaactatgtagtcc

SEQ ID NO: 48902 - DNA, 20 bp, synthetic construct
  misc_feature 1..20: note = chemically synthesized
  source 1..20: mol_type = other DNA
tgcaccctctgcccgatgct

SEQ ID NO: 48903 - DNA, 20 bp, synthetic construct
  misc_feature 1..20: note = chemically synthesized
  source 1..20: mol_type = other DNA
accctctgcccgatgcttgg

SEQ ID NO: 48904 - DNA, 20 bp, synthetic construct
  misc_feature 1..20: note = chemically synthesized
  source 1..20: mol_type = other DNA
tctgcccgatgcttggtagt

SEQ ID NO: 48905 - DNA, 20 bp, synthetic construct
  misc_feature 1..20: note = chemically synthesized
  source 1..20: mol_type = other DNA
agtcagaaacttccatcatg

SEQ ID NO: 48906 - DNA, 20 bp, synthetic construct
  misc_feature 1..20: note = chemically synthesized
  source 1..20: mol_type = other DNA
ttccatcatgcagctctgcc

SEQ ID NO: 48907 - DNA, 20 bp, synthetic construct
  misc_feature 1..20: note = chemically synthesized
  source 1..20: mol_type = other DNA
catgcagctctgcccagatt

SEQ ID NO: 48908 - DNA, 20 bp, synthetic construct
  misc_feature 1..20: note = chemically synthesized
  source 1..20: mol_type = other DNA
agctctgcccagattgagct

SEQ ID NO: 48909 - DNA, 20 bp, synthetic construct
  misc_feature 1..20: note = chemically synthesized
  source 1..20: mol_type = other DNA
ctgcccagattgagctgagc

SEQ ID NO: 48910 - DNA, 20 bp, synthetic construct
  misc_feature 1..20: note = chemically synthesized
  source 1..20: mol_type = other DNA
gattgagctgagctggcctc

SEQ ID NO: 48911 - DNA, 20 bp, synthetic construct
  misc_feature 1..20: note = chemically synthesized
  source 1..20: mol_type = other DNA
ttgagctgagctggcctctg

SEQ ID NO: 48912 - DNA, 20 bp, synthetic construct
  misc_feature 1..20: note = chemically synthesized
  source 1..20: mol_type = other DNA
gctgagctggcctctggagt

SEQ ID NO: 48913 - DNA, 20 bp, synthetic construct
  misc_feature 1..20: note = chemically synthesized
  source 1..20: mol_type = other DNA
ctgagctggcctctggagtg

SEQ ID NO: 48914 - DNA, 20 bp, synthetic construct
  misc_feature 1..20: note = chemically synthesized
  source 1..20: mol_type = other DNA
tggcctctggagtgaggtgc

SEQ ID NO: 48915 - DNA, 20 bp, synthetic construct
  misc_feature 1..20: note = chemically synthesized
  source 1..20: mol_type = other DNA
ggcctctggagtgaggtgct

SEQ ID NO: 48916 - DNA, 20 bp, synthetic construct
  misc_feature 1..20: note = chemically synthesized
  source 1..20: mol_type = other DNA
catgctgctcatgtcaactc

SEQ ID NO: 48917 - DNA, 20 bp, synthetic construct
  misc_feature 1..20: note = chemically synthesized
  source 1..20: mol_type = other DNA
gctcatgtcaactccagatg

SEQ ID NO: 48918 - DNA, 20 bp, synthetic construct
  misc_feature 1..20: note = chemically synthesized
  source 1..20: mol_type = other DNA
atgtcaactccagatgcagt

SEQ ID NO: 48919 - DNA, 20 bp, synthetic construct
  misc_feature 1..20: note = chemically synthesized
  source 1..20: mol_type = other DNA
tgtcaactccagatgcagtc

SEQ ID NO: 48920 - DNA, 20 bp, synthetic construct
  misc_feature 1..20: note = chemically synthesized
  source 1..20: mol_type = other DNA
gcagtcaggtttctgaacca

SEQ ID NO: 48921 - DNA, 20 bp, synthetic construct
  misc_feature 1..20: note = chemically synthesized
  source 1..20: mol_type = other DNA
tgaaccaaagtcaatgatct

SEQ ID NO: 48922 - DNA, 20 bp, synthetic construct
  misc_feature 1..20: note = chemically synthesized
  source 1..20: mol_type = other DNA
caaagtcaatgatctaagtg

SEQ ID NO: 48923 - DNA, 20 bp, synthetic construct
  misc_feature 1..20: note = chemically synthesized
  source 1..20: mol_type = other DNA
caatgatctaagtgcagtca

SEQ ID NO: 48924 - DNA, 20 bp, synthetic construct
  misc_feature 1..20: note = chemically synthesized
  source 1..20: mol_type = other DNA
aatgatctaagtgcagtcaa

SEQ ID NO: 48925 - DNA, 20 bp, synthetic construct
  misc_feature 1..20: note = chemically synthesized
  source 1..20: mol_type = other DNA
ctaagtgcagtcaaaggctc

SEQ ID NO: 48926 - DNA, 20 bp, synthetic construct
  misc_feature 1..20: note = chemically synthesized
  source 1..20: mol_type = other DNA
taagtgcagtcaaaggctct

SEQ ID NO: 48927 - DNA, 20 bp, synthetic construct
  misc_feature 1..20: note = chemically synthesized
  source 1..20: mol_type = other DNA
aagtgcagtcaaaggctctg

SEQ ID NO: 48928 - DNA, 20 bp, synthetic construct
  misc_feature 1..20: note = chemically synthesized
  source 1..20: mol_type = other DNA
agtgcagtcaaaggctctgg

SEQ ID NO: 48929 - DNA, 20 bp, synthetic construct
  misc_feature 1..20: note = chemically synthesized
  source 1..20: mol_type = other DNA
gcagtcaaaggctctggggg

SEQ ID NO: 48930 - DNA, 20 bp, synthetic construct
  misc_feature 1..20: note = chemically synthesized
  source 1..20: mol_type = other DNA
tcaaaggctctgggggaaga

SEQ ID NO: 48931 - DNA, 20 bp, synthetic construct
  misc_feature 1..20: note = chemically synthesized
  source 1..20: mol_type = other DNA
aaaggctctgggggaagaaa

SEQ ID NO: 48932 - DNA, 20 bp, synthetic construct
  misc_feature 1..20: note = chemically synthesized
  source 1..20: mol_type = other DNA
aggctctgggggaagaaaga

SEQ ID NO: 48933 - DNA, 20 bp, synthetic construct
  misc_feature 1..20: note = chemically synthesized
  source 1..20: mol_type = other DNA
gctctgggggaagaaagaga

SEQ ID NO: 48934 - DNA, 20 bp, synthetic construct
  misc_feature 1..20: note = chemically synthesized
  source 1..20: mol_type = other DNA
ttgcctgtgccatgctcgca

SEQ ID NO: 48935 - DNA, 20 bp, synthetic construct
  misc_feature 1..20: note = chemically synthesized
  source 1..20: mol_type = other DNA
ctgtgccatgctcgcaaagc

SEQ ID NO: 48936 - DNA, 20 bp, synthetic construct
  misc_feature 1..20: note = chemically synthesized
  source 1..20: mol_type = other DNA
tgtgccatgctcgcaaagca

SEQ ID NO: 48937 - DNA, 20 bp, synthetic construct
  misc_feature 1..20: note = chemically synthesized
  source 1..20: mol_type = other DNA
tttttgcaaaattctaatga

SEQ ID NO: 48938 - DNA, 20 bp, synthetic construct
  misc_feature 1..20: note = chemically synthesized
  source 1..20: mol_type = other DNA
tgcaaaattctaatgaaagc

SEQ ID NO: 48939 - DNA, 20 bp, synthetic construct
  misc_feature 1..20: note = chemically synthesized
  source 1..20: mol_type = other DNA
gcaaaattctaatgaaagct

SEQ ID NO: 48940 - DNA, 20 bp, synthetic construct
  misc_feature 1..20: note = chemically synthesized
  source 1..20: mol_type = other DNA
gaaagctgggcttgcaaaat

SEQ ID NO: 48941 - DNA, 20 bp, synthetic construct
  misc_feature 1..20: note = chemically synthesized
  source 1..20: mol_type = other DNA
ggcttgcaaaattagaaaac

SEQ ID NO: 48942 - DNA, 20 bp, synthetic construct
  misc_feature 1..20: note = chemically synthesized
  source 1..20: mol_type = other DNA
tagaaaactggattatttgt

SEQ ID NO: 48943 - DNA, 20 bp, synthetic construct
  misc_feature 1..20: note = chemically synthesized
  source 1..20: mol_type = other DNA
tgagaacactgaaacatccc

SEQ ID NO: 48944 - DNA, 20 bp, synthetic construct
  misc_feature 1..20: note = chemically synthesized
  source 1..20: mol_type = other DNA
gagaacactgaaacatccct

SEQ ID NO: 48945 - DNA, 20 bp, synthetic construct
  misc_feature 1..20: note = chemically synthesized
  source 1..20: mol_type = other DNA
catccctgggtgtgtccatc

SEQ ID NO: 48946 - DNA, 20 bp, synthetic construct
  misc_feature 1..20: note = chemically synthesized
  source 1..20: mol_type = other DNA
ggtgtgtccatctggaaaaa

SEQ ID NO: 48947 - DNA, 20 bp, synthetic construct
  misc_feature 1..20: note = chemically synthesized
  source 1..20: mol_type = other DNA
tggaaaaacagcatttcctc

SEQ ID NO: 48948 - DNA, 20 bp, synthetic construct
  misc_feature 1..20: note = chemically synthesized
  source 1..20: mol_type = other DNA
gcaaccgttctatttgaatt

SEQ ID NO: 48949 - DNA, 20 bp, synthetic construct
  misc_feature 1..20: note = chemically synthesized
  source 1..20: mol_type = other DNA
cgttctatttgaatttggca

SEQ ID NO: 48950 - DNA, 20 bp, synthetic construct
  misc_feature 1..20: note = chemically synthesized
  source 1..20: mol_type = other DNA
tgaatttggcaaagaaaata

SEQ ID NO: 48951 - DNA, 20 bp, synthetic construct
  misc_feature 1..20: note = chemically synthesized
  source 1..20: mol_type = other DNA
atttggcaaagaaaataaag

SEQ ID NO: 48952 - DNA, 20 bp, synthetic construct
  misc_feature 1..20: note = chemically synthesized
  source 1..20: mol_type = other DNA
aataaagcagtttttcacaa

SEQ ID NO: 48953 - DNA, 20 bp, synthetic construct
  misc_feature 1..20: note = chemically synthesized
  source 1..20: mol_type = other DNA
cacaaaagaataaacacaac

SEQ ID NO: 48954 - DNA, 20 bp, synthetic construct
  misc_feature 1..20: note = chemically synthesized
  source 1..20: mol_type = other DNA
acaaaagaataaacacaacc

SEQ ID NO: 48955 - DNA, 20 bp, synthetic construct
  misc_feature 1..20: note = chemically synthesized
  source 1..20: mol_type = other DNA
aaaagaataaacacaaccag

SEQ ID NO: 48956 - DNA, 20 bp, synthetic construct
  misc_feature 1..20: note = chemically synthesized
  source 1..20: mol_type = other DNA
ttcactctcccaaattgtca

SEQ ID NO: 48957 - DNA, 20 bp, synthetic construct
  misc_feature 1..20: note = chemically synthesized
  source 1..20: mol_type = other DNA
actctcccaaattgtcaaag

SEQ ID NO: 48958 - DNA, 20 bp, synthetic construct
  misc_feature 1..20: note = chemically synthesized
  source 1..20: mol_type = other DNA
attgtcaaagaagtataaat

SEQ ID NO: 48959 - DNA, 20 bp, synthetic construct
  misc_feature 1..20: note = chemically synthesized
  source 1..20: mol_type = other DNA
gtataaattagaaaatgaat

SEQ ID NO: 48960 - DNA, 20 bp, synthetic construct
  misc_feature 1..20: note = chemically synthesized
  source 1..20: mol_type = other DNA
tataaattagaaaatgaatc

SEQ ID NO: 48961 - DNA, 20 bp, synthetic construct
  misc_feature 1..20: note = chemically synthesized
  source 1..20: mol_type = other DNA
tcaggacaatttcaacctgt

SEQ ID NO: 48962 - DNA, 20 bp, synthetic construct
  misc_feature 1..20: note = chemically synthesized
  source 1..20: mol_type = other DNA
acaatttcaacctgttagat

SEQ ID NO: 48963 - DNA, 20 bp, synthetic construct
  misc_feature 1..20: note = chemically synthesized
  source 1..20: mol_type = other DNA
taaaaattgaacactcatac

SEQ ID NO: 48964 - DNA, 20 bp, synthetic construct
  misc_feature 1..20: note = chemically synthesized
  source 1..20: mol_type = other DNA
attgaacactcatacaagtg

SEQ ID NO: 48965 - DNA, 20 bp, synthetic construct
  misc_feature 1..20: note = chemically synthesized
  source 1..20: mol_type = other DNA
acactcatacaagtgtggtg

SEQ ID NO: 48966 - DNA, 20 bp, synthetic construct
  misc_feature 1..20: note = chemically synthesized
  source 1..20: mol_type = other DNA
gtggtgaagtgattgttttc

SEQ ID NO: 48967 - DNA, 20 bp, synthetic construct
  misc_feature 1..20: note = chemically synthesized
  source 1..20: mol_type = other DNA
tttacactgtcataaccttc

SEQ ID NO: 48968 - DNA, 20 bp, synthetic construct
  misc_feature 1..20: note = chemically synthesized
  source 1..20: mol_type = other DNA
taaccttctagaaaataaat

SEQ ID NO: 48969 - DNA, 20 bp, synthetic construct
  misc_feature 1..20: note = chemically synthesized
  source 1..20: mol_type = other DNA
ccttctagaaaataaattgg

SEQ ID NO: 48970 - DNA, 20 bp, synthetic construct
  misc_feature 1..20: note = chemically synthesized
  source 1..20: mol_type = other DNA
aaataaattggcagtgttat

SEQ ID NO: 48971 - DNA, 20 bp, synthetic construct
  misc_feature 1..20: note = chemically synthesized
  source 1..20: mol_type = other DNA
aataaattggcagtgttatt

SEQ ID NO: 48972 - DNA, 20 bp, synthetic construct
  misc_feature 1..20: note = chemically synthesized
  source 1..20: mol_type = other DNA
taaattggcagtgttattgg

SEQ ID NO: 48973 - DNA, 20 bp, synthetic construct
  misc_feature 1..20: note = chemically synthesized
  source 1..20: mol_type = other DNA
ttggcagtgttattgggaga

SEQ ID NO: 48974 - DNA, 20 bp, synthetic construct
  misc_feature 1..20: note = chemically synthesized
  source 1..20: mol_type = other DNA
aaatatgtctatataattta

SEQ ID NO: 48975 - DNA, 20 bp, synthetic construct
  misc_feature 1..20: note = chemically synthesized
  source 1..20: mol_type = other DNA
aatatgtctatataatttat

SEQ ID NO: 48976 - DNA, 20 bp, synthetic construct
  misc_feature 1..20: note = chemically synthesized
  source 1..20: mol_type = other DNA
ctatataatttatgggaact

SEQ ID NO: 48977 - DNA, 20 bp, synthetic construct
  misc_feature 1..20: note = chemically synthesized
  source 1..20: mol_type = other DNA
tatataatttatgggaactt

SEQ ID NO: 48978 - DNA, 20 bp, synthetic construct
  misc_feature 1..20: note = chemically synthesized
  source 1..20: mol_type = other DNA
aatttatgggaacttaggct

SEQ ID NO: 48979 - DNA, 20 bp, synthetic construct
  misc_feature 1..20: note = chemically synthesized
  source 1..20: mol_type = other DNA
acttaggctcagaaaatatt

SEQ ID NO: 48980 - DNA, 20 bp, synthetic construct
  misc_feature 1..20: note = chemically synthesized
  source 1..20: mol_type = other DNA
cttaggctcagaaaatatta

SEQ ID NO: 48981 - DNA, 20 bp, synthetic construct
  misc_feature 1..20: note = chemically synthesized
  source 1..20: mol_type = other DNA
ctcagaaaatattaaggaat

SEQ ID NO: 48982 - DNA, 20 bp, synthetic construct
  misc_feature 1..20: note = chemically synthesized
  source 1..20: mol_type = other DNA
aagaatgaactttatgaaca

SEQ ID NO: 48983 - DNA, 20 bp, synthetic construct
  misc_feature 1..20: note = chemically synthesized
  source 1..20: mol_type = other DNA
gaactttatgaacaaagatg

SEQ ID NO: 48984 - DNA, 20 bp, synthetic construct
  misc_feature 1..20: note = chemically synthesized
  source 1..20: mol_type = other DNA
actttatgaacaaagatgtg

SEQ ID NO: 48985 - DNA, 20 bp, synthetic construct
  misc_feature 1..20: note = chemically synthesized
  source 1..20: mol_type = other DNA
ctttatgaacaaagatgtgg

SEQ ID NO: 48986 - DNA, 20 bp, synthetic construct
  misc_feature 1..20: note = chemically synthesized
  source 1..20: mol_type = other DNA
tttatgaacaaagatgtgga

SEQ ID NO: 48987 - DNA, 20 bp, synthetic construct
  misc_feature 1..20: note = chemically synthesized
  source 1..20: mol_type = other DNA
tgaacaaagatgtggagggt

SEQ ID NO: 48988 - DNA, 20 bp, synthetic construct
  misc_feature 1..20: note = chemically synthesized
  source 1..20: mol_type = other DNA
acaaagatgtggagggttgg

SEQ ID NO: 48989 - DNA, 20 bp, synthetic construct
  misc_feature 1..20: note = chemically synthesized
  source 1..20: mol_type = other DNA
agatgtggagggttggaagc

SEQ ID NO: 48990 - DNA, 20 bp, synthetic construct
  misc_feature 1..20: note = chemically synthesized
  source 1..20: mol_type = other DNA
atgtggagggttggaagcaa

SEQ ID NO: 48991 - DNA, 20 bp, synthetic construct
  misc_feature 1..20: note = chemically synthesized
  source 1..20: mol_type = other DNA
tgtggagggttggaagcaag

SEQ ID NO: 48992 - DNA, 20 bp, synthetic construct
  misc_feature 1..20: note = chemically synthesized
  source 1..20: mol_type = other DNA
gtggagggttggaagcaaga

SEQ ID NO: 48993 - DNA, 20 bp, synthetic construct
  misc_feature 1..20: note = chemically synthesized
  source 1..20: mol_type = other DNA
tggagggttggaagcaagag

SEQ ID NO: 48994 - DNA, 20 bp, synthetic construct
  misc_feature 1..20: note = chemically synthesized
  source 1..20: mol_type = other DNA
ggagggttggaagcaagagg

SEQ ID NO: 48995 - DNA, 20 bp, synthetic construct
  misc_feature 1..20: note = chemically synthesized
  source 1..20: mol_type = other DNA
gagggttggaagcaagaggg

SEQ ID NO: 48996 - DNA, 20 bp, synthetic construct
  misc_feature 1..20: note = chemically synthesized
  source 1..20: mol_type = other DNA
aagaggggggccaacgcgca

SEQ ID NO: 48997 - DNA, 20 bp, synthetic construct
  misc_feature 1..20: note = chemically synthesized
  source 1..20: mol_type = other DNA
agaggggggccaacgcgcac

SEQ ID NO: 48998 - DNA, 20 bp, synthetic construct
  misc_feature 1..20: note = chemically synthesized
  source 1..20: mol_type = other DNA
gaggggggccaacgcgcacg

SEQ ID NO: 48999 - DNA, 20 bp, synthetic construct
  misc_feature 1..20: note = chemically synthesized
  source 1..20: mol_type = other DNA
ggggggccaacgcgcacggg

SEQ ID NO: 49000 - DNA, 20 bp, synthetic construct
  misc_feature 1..20: note = chemically synthesized
  source 1..20: mol_type = other DNA
gggggccaacgcgcacgggg

SEQ ID NO: 49001 - DNA, 20 bp, synthetic construct
  misc_feature 1..20: note = chemically synthesized
  source 1..20: mol_type = other DNA
ggccaacgcgcacggggagg

SEQ ID NO: 49002 - DNA, 20 bp, synthetic construct
  misc_feature 1..20: note = chemically synthesized
  source 1..20: mol_type = other DNA
gcgcacggggaggaagcatt

SEQ ID NO: 49003 - DNA, 20 bp, synthetic construct
  misc_feature 1..20: note = chemically synthesized
  source 1..20: mol_type = other DNA
cgcacggggaggaagcattt

SEQ ID NO: 49004 - DNA, 20 bp, synthetic construct
  misc_feature 1..20: note = chemically synthesized
  source 1..20: mol_type = other DNA
acggggaggaagcatttggg

SEQ ID NO: 49005 - DNA, 20 bp, synthetic construct
  misc_feature 1..20: note = chemically synthesized
  source 1..20: mol_type = other DNA
gcatttgggcagtgactccg

SEQ ID NO: 49006 - DNA, 20 bp, synthetic construct
  misc_feature 1..20: note = chemically synthesized
  source 1..20: mol_type = other DNA
gggcagtgactccgcagacc

SEQ ID NO: 49007 - DNA, 20 bp, synthetic construct
  misc_feature 1..20: note = chemically synthesized
  source 1..20: mol_type = other DNA
ggcagtgactccgcagaccc

SEQ ID NO: 49008 - DNA, 20 bp, synthetic construct
  misc_feature 1..20: note = chemically synthesized
  source 1..20: mol_type = other DNA
tgactccgcagacccaggct

SEQ ID NO: 49009 - DNA, 20 bp, synthetic construct
  misc_feature 1..20: note = chemically synthesized
  source 1..20: mol_type = other DNA
gactccgcagacccaggctc

SEQ ID NO: 49010 - DNA, 20 bp, synthetic construct
  misc_feature 1..20: note = chemically synthesized
  source 1..20: mol_type = other DNA
gacccaggctcaggttgaac

SEQ ID NO: 49011 - DNA, 20 bp, synthetic construct
  misc_feature 1..20: note = chemically synthesized
  source 1..20: mol_type = other DNA
tagacaacctccttacacct

SEQ ID NO: 49012 - DNA, 20 bp, synthetic construct
  misc_feature 1..20: note = chemically synthesized
  source 1..20: mol_type = other DNA
cacctcagtttccttaactg

SEQ ID NO: 49013 - DNA, 20 bp, synthetic construct
  misc_feature 1..20: note = chemically synthesized
  source 1..20: mol_type = other DNA
cctcagtttccttaactgta

SEQ ID NO: 49014 - DNA, 20 bp, synthetic construct
  misc_feature 1..20: note = chemically synthesized
  source 1..20: mol_type = other DNA
cagtttccttaactgtagag

SEQ ID NO: 49015 - DNA, 20 bp, synthetic construct
  misc_feature 1..20: note = chemically synthesized
  source 1..20: mol_type = other DNA
agtttccttaactgtagagc

SEQ ID NO: 49016 - DNA, 20 bp, synthetic construct
  misc_feature 1..20: note = chemically synthesized
  source 1..20: mol_type = other DNA
tttccttaactgtagagcag

SEQ ID NO: 49017 - DNA, 20 bp, synthetic construct
  misc_feature 1..20: note = chemically synthesized
  source 1..20: mol_type = other DNA
taactgtagagcaggagtga

SEQ ID NO: 49018 - DNA, 20 bp, synthetic construct
  misc_feature 1..20: note = chemically synthesized
  source 1..20: mol_type = other DNA
tgatggaactgcctgtttca

SEQ ID NO: 49019 - DNA, 20 bp, synthetic construct
  misc_feature 1..20: note = chemically synthesized
  source 1..20: mol_type = other DNA
gatggaactgcctgtttcat

SEQ ID NO: 49020 - DNA, 20 bp, synthetic construct
  misc_feature 1..20: note = chemically synthesized
  source 1..20: mol_type = other DNA
ctgtttcataggactgttgt

SEQ ID NO: 49021 - DNA, 20 bp, synthetic construct
  misc_feature 1..20: note = chemically synthesized
  source 1..20: mol_type = other DNA
tgtttcataggactgttgtg

SEQ ID NO: 49022 - DNA, 20 bp, synthetic construct
  misc_feature 1..20: note = chemically synthesized
  source 1..20: mol_type = other DNA
ataggactgttgtgaggatg

SEQ ID NO: 49023 - DNA, 20 bp, synthetic construct
  misc_feature 1..20: note = chemically synthesized
  source 1..20: mol_type = other DNA
gactgttgtgaggatgaagt

SEQ ID NO: 49024 - DNA, 20 bp, synthetic construct
  misc_feature 1..20: note = chemically synthesized
  source 1..20: mol_type = other DNA
agtgagatacaccacattat

SEQ ID NO: 49025 - DNA, 20 bp, synthetic construct
  misc_feature 1..20: note = chemically synthesized
  source 1..20: mol_type = other DNA
ccacattataagcttgtgcc

SEQ ID NO: 49026 - DNA, 20 bp, synthetic construct
  misc_feature 1..20: note = chemically synthesized
  source 1..20: mol_type = other DNA
attataagcttgtgcctgga

SEQ ID NO: 49027 - DNA, 20 bp, synthetic construct
  misc_feature 1..20: note = chemically synthesized
  source 1..20: mol_type = other DNA
ttataagcttgtgcctggaa

SEQ ID NO: 49028 - DNA, 20 bp, synthetic construct
  misc_feature 1..20: note = chemically synthesized
  source 1..20: mol_type = other DNA
tgcctggaaaggataatgct

SEQ ID NO: 49029 - DNA, 20 bp, synthetic construct
  misc_feature 1..20: note = chemically synthesized
  source 1..20: mol_type = other DNA
ttattgcaataaaatgtaca

SEQ ID NO: 49030 - DNA, 20 bp, synthetic construct
  misc_feature 1..20: note = chemically synthesized
  source 1..20: mol_type = other DNA
caataaaatgtacacagcgt

SEQ ID NO: 49031 - DNA, 20 bp, synthetic construct
  misc_feature 1..20: note = chemically synthesized
  source 1..20: mol_type = other DNA
ataaaatgtacacagcgtaa

SEQ ID NO: 49032 - DNA, 20 bp, synthetic construct
  misc_feature 1..20: note = chemically synthesized
  source 1..20: mol_type = other DNA
tactattttaaccatttttg

SEQ ID NO: 49033 - DNA, 20 bp, synthetic construct
  misc_feature 1..20: note = chemically synthesized
  source 1..20: mol_type = other DNA
actattttaaccatttttgc

SEQ ID NO: 49034 - DNA, 20 bp, synthetic construct
  misc_feature 1..20: note = chemically synthesized
  source 1..20: mol_type = other DNA
ctattttaaccatttttgca

SEQ ID NO: 49035 - DNA, 20 bp, synthetic construct
  misc_feature 1..20: note = chemically synthesized
  source 1..20: mol_type = other DNA
catttttgcagggtaccacc

SEQ ID NO: 49036 - DNA, 20 bp, synthetic construct
  misc_feature 1..20: note = chemically synthesized
  source 1..20: mol_type = other DNA
ttttgcagggtaccaccaag

SEQ ID NO: 49037 - DNA, 20 bp, synthetic construct
  misc_feature 1..20: note = chemically synthesized
  source 1..20: mol_type = other DNA
gggtaccaccaagtggcatt

SEQ ID NO: 49038 - DNA, 20 bp, synthetic construct
  misc_feature 1..20: note = chemically synthesized
  source 1..20: mol_type = other DNA
agtggcatttagtacattca

SEQ ID NO: 49039 - DNA, 20 bp, synthetic construct
  misc_feature 1..20: note = chemically synthesized
  source 1..20: mol_type = other DNA
ggcatttagtacattcacag

SEQ ID NO: 49040 - DNA, 20 bp, synthetic construct
  misc_feature 1..20: note = chemically synthesized
  source 1..20: mol_type = other DNA
tgcaaccatcatcatatttc

SEQ ID NO: 49041 - DNA, 20 bp, synthetic construct
  misc_feature 1..20: note = chemically synthesized
  source 1..20: mol_type = other DNA
gaatattttcctcatcccca

SEQ ID NO: 49042 - DNA, 20 bp, synthetic construct
  misc_feature 1..20: note = chemically synthesized
  source 1..20: mol_type = other DNA
aatattttcctcatccccaa

SEQ ID NO: 49043 - DNA, 20 bp, synthetic construct
  misc_feature 1..20: note = chemically synthesized
  source 1..20: mol_type = other DNA
gaaacctcatgctcattaat

SEQ ID NO: 49044 - DNA, 20 bp, synthetic construct
  misc_feature 1..20: note = chemically synthesized
  source 1..20: mol_type = other DNA
acctcatgctcattaatcag

SEQ ID NO: 49045 - DNA, 20 bp, synthetic construct
  misc_feature 1..20: note = chemically synthesized
  source 1..20: mol_type = other DNA
gtagctctcctttaaaatat

SEQ ID NO: 49046 - DNA, 20 bp, synthetic construct
  misc_feature 1..20: note = chemically synthesized
  source 1..20: mol_type = other DNA
cctttaaaatattagttatg

SEQ ID NO: 49047 - DNA, 20 bp, synthetic construct
  misc_feature 1..20: note = chemically synthesized
  source 1..20: mol_type = other DNA
aatattagttatgaagatca

SEQ ID NO: 49048 - DNA, 20 bp, synthetic construct
  misc_feature 1..20: note = chemically synthesized
  source 1..20: mol_type = other DNA
aaaactcattatgtaatgtt

SEQ ID NO: 49049 - DNA, 20 bp, synthetic construct
  misc_feature 1..20: note = chemically synthesized
  source 1..20: mol_type = other DNA
gtaatgttgagtgaaaaaat

SEQ ID NO: 49050 - DNA, 20 bp, synthetic construct
  misc_feature 1..20: note = chemically synthesized
  source 1..20: mol_type = other DNA
taatgttgagtgaaaaaatc

SEQ ID NO: 49051 - DNA, 20 bp, synthetic construct
  misc_feature 1..20: note = chemically synthesized
  source 1..20: mol_type = other DNA
aatgttgagtgaaaaaatca

SEQ ID NO: 49052 - DNA, 20 bp, synthetic construct
  misc_feature 1..20: note = chemically synthesized
  source 1..20: mol_type = other DNA
attttgtgatatgatgtaat

SEQ ID NO: 49053 - DNA, 20 bp, synthetic construct
  misc_feature 1..20: note = chemically synthesized
  source 1..20: mol_type = other DNA
tgatatgatgtaattagtga

SEQ ID NO: 49054 - DNA, 20 bp, synthetic construct
  misc_feature 1..20: note = chemically synthesized
  source 1..20: mol_type = other DNA
tatgatgtaattagtgaaag

SEQ ID NO: 49055 - DNA, 20 bp, synthetic construct
  misc_feature 1..20: note = chemically synthesized
  source 1..20: mol_type = other DNA
tagtgaaagaagcatacaaa

SEQ ID NO: 49056 - DNA, 20 bp, synthetic construct
  misc_feature 1..20: note = chemically synthesized
  source 1..20: mol_type = other DNA
gtctgaaaatataaaaacaa

SEQ ID NO: 49057 - DNA, 20 bp, synthetic construct
  misc_feature 1..20: note = chemically synthesized
  source 1..20: mol_type = other DNA
acaatagcaattgcatttct

SEQ ID NO: 49058 - DNA, 20 bp, synthetic construct
  misc_feature 1..20: note = chemically synthesized
  source 1..20: mol_type = other DNA
catttaaacattattcttta

SEQ ID NO: 49059 - DNA, 20 bp, synthetic construct
  misc_feature 1..20: note = chemically synthesized
  source 1..20: mol_type = other DNA
attattctttatggttttaa

SEQ ID NO: 49060 - DNA, 20 bp, synthetic construct
  misc_feature 1..20: note = chemically synthesized
  source 1..20: mol_type = other DNA
tctttatggttttaaaagca

SEQ ID NO: 49061 - DNA, 20 bp, synthetic construct
  misc_feature 1..20: note = chemically synthesized
  source 1..20: mol_type = other DNA
tggttttaaaagcaaagaaa

SEQ ID NO: 49062 - DNA, 20 bp, synthetic construct
  misc_feature 1..20: note = chemically synthesized
  source 1..20: mol_type = other DNA
ggttttaaaagcaaagaaaa

SEQ ID NO: 49063 - DNA, 20 bp, synthetic construct
  misc_feature 1..20: note = chemically synthesized
  source 1..20: mol_type = other DNA
taaaagcaaagaaaaaggta

SEQ ID NO: 49064 - DNA, 20 bp, synthetic construct
  misc_feature 1..20: note = chemically synthesized
  source 1..20: mol_type = other DNA
agaaacaacaaccaaccgca

SEQ ID NO: 49065 - DNA, 20 bp, synthetic construct
  misc_feature 1..20: note = chemically synthesized
  source 1..20: mol_type = other DNA
aaccgcaaagcaccatgaca

SEQ ID NO: 49066 - DNA, 20 bp, synthetic construct
  misc_feature 1..20: note = chemically synthesized
  source 1..20: mol_type = other DNA
caaagcaccatgacaaagct

SEQ ID NO: 49067 - DNA, 20 bp, synthetic construct
  misc_feature 1..20: note = chemically synthesized
  source 1..20: mol_type = other DNA
aaagctcagattgttaaatc

SEQ ID NO: 49068 - DNA, 20 bp, synthetic construct
  misc_feature 1..20: note = chemically synthesized
  source 1..20: mol_type = other DNA
aagctcagattgttaaatcc

SEQ ID NO: 49069 - DNA, 20 bp, synthetic construct
  misc_feature 1..20: note = chemically synthesized
  source 1..20: mol_type = other DNA
gattgttaaatccaggtttt

SEQ ID NO: 49070 - DNA, 20 bp, synthetic construct
  misc_feature 1..20: note = chemically synthesized
  source 1..20: mol_type = other DNA
aaatccaggtttttggaaca

SEQ ID NO: 49071 - DNA, 20 bp, synthetic construct
  misc_feature 1..20: note = chemically synthesized
  source 1..20: mol_type = other DNA
tatatgacgtttacactctc

SEQ ID NO: 49072 - DNA, 20 bp, synthetic construct
  misc_feature 1..20: note = chemically synthesized
  source 1..20: mol_type = other DNA
atatgacgtttacactctcc

SEQ ID NO: 49073 - DNA, 20 bp, synthetic construct
  misc_feature 1..20: note = chemically synthesized
  source 1..20: mol_type = other DNA
tatgacgtttacactctcca

SEQ ID NO: 49074 - DNA, 20 bp, synthetic construct
  misc_feature 1..20: note = chemically synthesized
  source 1..20: mol_type = other DNA
cgtttacactctccagggtt

SEQ ID NO: 49075 - DNA, 20 bp, synthetic construct
  misc_feature 1..20: note = chemically synthesized
  source 1..20: mol_type = other DNA
tttacactctccagggttca

SEQ ID NO: 49076 - DNA, 20 bp, synthetic construct
  misc_feature 1..20: note = chemically synthesized
  source 1..20: mol_type = other DNA
tacactctccagggttcaga

SEQ ID NO: 49077 - DNA, 20 bp, synthetic construct
  misc_feature 1..20: note = chemically synthesized
  source 1..20: mol_type = other DNA
tctccagggttcagagagtc

SEQ ID NO: 49078 - DNA, 20 bp, synthetic construct
  misc_feature 1..20: note = chemically synthesized
  source 1..20: mol_type = other DNA
ccagggttcagagagtctgg

SEQ ID NO: 49079 - DNA, 20 bp, synthetic construct
  misc_feature 1..20: note = chemically synthesized
  source 1..20: mol_type = other DNA
ttcagagagtctggcagcat

SEQ ID NO: 49080 - DNA, 20 bp, synthetic construct
  misc_feature 1..20: note = chemically synthesized
  source 1..20: mol_type = other DNA
tcagagagtctggcagcatt

SEQ ID NO: 49081 - DNA, 20 bp, synthetic construct
  misc_feature 1..20: note = chemically synthesized
  source 1..20: mol_type = other DNA
agagagtctggcagcattgg

SEQ ID NO: 49082 - DNA, 20 bp, synthetic construct
  misc_feature 1..20: note = chemically synthesized
  source 1..20: mol_type = other DNA
gggagctgccttgtgttcta

SEQ ID NO: 49083 - DNA, 20 bp, synthetic construct
  misc_feature 1..20: note = chemically synthesized
  source 1..20: mol_type = other DNA
ccttgtgttctacagcctca

SEQ ID NO: 49084 - DNA, 20 bp, synthetic construct
  misc_feature 1..20: note = chemically synthesized
  source 1..20: mol_type = other DNA
gtgttctacagcctcacgga

SEQ ID NO: 49085 - DNA, 20 bp, synthetic construct
  misc_feature 1..20: note = chemically synthesized
  source 1..20: mol_type = other DNA
tctacagcctcacggacaga

SEQ ID NO: 49086 - DNA, 20 bp, synthetic construct
  misc_feature 1..20: note = chemically synthesized
  source 1..20: mol_type = other DNA
ctacagcctcacggacagac

SEQ ID NO: 49087 - DNA, 20 bp, synthetic construct
  misc_feature 1..20: note = chemically synthesized
  source 1..20: mol_type = other DNA
acagcctcacggacagacag

SEQ ID NO: 49088 - DNA, 20 bp, synthetic construct
  misc_feature 1..20: note = chemically synthesized
  source 1..20: mol_type = other DNA
cagcctcacggacagacagg

SEQ ID NO: 49089 - DNA, 20 bp, synthetic construct
  misc_feature 1..20: note = chemically synthesized
  source 1..20: mol_type = other DNA
tcaccactgctctgttcttc

SEQ ID NO: 49090 - DNA, 20 bp, synthetic construct
  misc_feature 1..20: note = chemically synthesized
  source 1..20: mol_type = other DNA
accactgctctgttcttctg

SEQ ID NO: 49091 - DNA, 20 bp, synthetic construct
  misc_feature 1..20: note = chemically synthesized
  source 1..20: mol_type = other DNA
gtttccttgtgaacatgttg

SEQ ID NO: 49092 - DNA, 20 bp, synthetic construct
  misc_feature 1..20: note = chemically synthesized
  source 1..20: mol_type = other DNA
ttgtgaacatgttgtggacg

SEQ ID NO: 49093 - DNA, 20 bp, synthetic construct
  misc_feature 1..20: note = chemically synthesized
  source 1..20: mol_type = other DNA
ttctttcatctttttaaaca

SEQ ID NO: 49094 - DNA, 20 bp, synthetic construct
  misc_feature 1..20: note = chemically synthesized
  source 1..20: mol_type = other DNA
tctttcatctttttaaacac

SEQ ID NO: 49095 - DNA, 20 bp, synthetic construct
  misc_feature 1..20: note = chemically synthesized
  source 1..20: mol_type = other DNA
tttttaaacacaggtacctt

SEQ ID NO: 49096 - DNA, 20 bp, synthetic construct
  misc_feature 1..20: note = chemically synthesized
  source 1..20: mol_type = other DNA
ttttaaacacaggtaccttt

SEQ ID NO: 49097 - DNA, 20 bp, synthetic construct
  misc_feature 1..20: note = chemically synthesized
  source 1..20: mol_type = other DNA
tttaaacacaggtacctttg

SEQ ID NO: 49098 - DNA, 20 bp, synthetic construct
  misc_feature 1..20: note = chemically synthesized
  source 1..20: mol_type = other DNA
aacacaggtacctttggggc

SEQ ID NO: 49099 - DNA, 20 bp, synthetic construct
  misc_feature 1..20: note = chemically synthesized
  source 1..20: mol_type = other DNA
cctttggggctggctttctc

SEQ ID NO: 49100 - DNA, 20 bp, synthetic construct
  misc_feature 1..20: note = chemically synthesized
  source 1..20: mol_type = other DNA
ctttggggctggctttctca

SEQ ID NO: 49101 - DNA, 20 bp, synthetic construct
  misc_feature 1..20: note = chemically synthesized
  source 1..20: mol_type = other DNA
tggggctggctttctcaagg

SEQ ID NO: 49102 - DNA, 20 bp, synthetic construct
  misc_feature 1..20: note = chemically synthesized
  source 1..20: mol_type = other DNA
ctggctttctcaaggaagcc

SEQ ID NO: 49103 - DNA, 20 bp, synthetic construct
  misc_feature 1..20: note = chemically synthesized
  source 1..20: mol_type = other DNA
aagcccagctccctgtgatt

SEQ ID NO: 49104 - DNA, 20 bp, synthetic construct
  misc_feature 1..20: note = chemically synthesized
  source 1..20: mol_type = other DNA
gctccctgtgattgagaatg

SEQ ID NO: 49105 - DNA, 20 bp, synthetic construct
  misc_feature 1..20: note = chemically synthesized
  source 1..20: mol_type = other DNA
atgaagtgtgcaatcgctat

SEQ ID NO: 49106 - DNA, 20 bp, synthetic construct
  misc_feature 1..20: note = chemically synthesized
  source 1..20: mol_type = other DNA
aatcgctatgagtttctgaa

SEQ ID NO: 49107 - DNA, 20 bp, synthetic construct
  misc_feature 1..20: note = chemically synthesized
  source 1..20: mol_type = other DNA
cgctatgagtttctgaatgg

SEQ ID NO: 49108 - DNA, 20 bp, synthetic construct
  misc_feature 1..20: note = chemically synthesized
  source 1..20: mol_type = other DNA
ctatgagtttctgaatggaa

SEQ ID NO: 49109 - DNA, 20 bp, synthetic construct
  misc_feature 1..20: note = chemically synthesized
  source 1..20: mol_type = other DNA
atggaagagtcaaatccact

SEQ ID NO: 49110 - DNA, 20 bp, synthetic construct
  misc_feature 1..20: note = chemically synthesized
  source 1..20: mol_type = other DNA
aaatccactgagctctgtgc

SEQ ID NO: 49111 - DNA, 20 bp, synthetic construct
  misc_feature 1..20: note = chemically synthesized
  source 1..20: mol_type = other DNA
aatccactgagctctgtgct

SEQ ID NO: 49112 - DNA, 20 bp, synthetic construct
  misc_feature 1..20: note = chemically synthesized
  source 1..20: mol_type = other DNA
tgagctctgtgctgggcatt

SEQ ID NO: 49113 - DNA, 20 bp, synthetic construct
  misc_feature 1..20: note = chemically synthesized
  source 1..20: mol_type = other DNA
ctctgtgctgggcatttggc

SEQ ID NO: 49114 - DNA, 20 bp, synthetic construct
  misc_feature 1..20: note = chemically synthesized
  source 1..20: mol_type = other DNA
ctgtgctgggcatttggctg

SEQ ID NO: 49115 - DNA, 20 bp, synthetic construct
  misc_feature 1..20: note = chemically synthesized
  source 1..20: mol_type = other DNA
tgtgctgggcatttggctgg

SEQ ID NO: 49116 - DNA, 20 bp, synthetic construct
  misc_feature 1..20: note = chemically synthesized
  source 1..20: mol_type = other DNA
catttggctggaggcattga

SEQ ID NO: 49117 - DNA, 20 bp, synthetic construct
  misc_feature 1..20: note = chemically synthesized
  source 1..20: mol_type = other DNA
ctggaggcattgacagttgc

SEQ ID NO: 49118 - DNA, 20 bp, synthetic construct
  misc_feature 1..20: note = chemically synthesized
  source 1..20: mol_type = other DNA
tggaggcattgacagttgca

SEQ ID NO: 49119 - DNA, 20 bp, synthetic construct
  misc_feature 1..20: note = chemically synthesized
  source 1..20: mol_type = other DNA
ggcattgacagttgcaaggt

SEQ ID NO: 49120 - DNA, 20 bp, synthetic construct
  misc_feature 1..20: note = chemically synthesized
  source 1..20: mol_type = other DNA
tgacagttgcaaggtaagaa

SEQ ID NO: 49121 - DNA, 20 bp, synthetic construct
  misc_feature 1..20: note = chemically synthesized
  source 1..20: mol_type = other DNA
ttgcaaggtaagaaaagatc

SEQ ID NO: 49122 - DNA, 20 bp, synthetic construct
  misc_feature 1..20: note = chemically synthesized
  source 1..20: mol_type = other DNA
gcaaggtaagaaaagatcaa

SEQ ID NO: 49123 - DNA, 20 bp, synthetic construct
  misc_feature 1..20: note = chemically synthesized
  source 1..20: mol_type = other DNA
aagaaaagatcaagagacca

SEQ ID NO: 49124 - DNA, 20 bp, synthetic construct
  misc_feature 1..20: note = chemically synthesized
  source 1..20: mol_type = other DNA
aaagatcaagagaccaaagt

SEQ ID NO: 49125 - DNA, 20 bp, synthetic construct
  misc_feature 1..20: note = chemically synthesized
  source 1..20: mol_type = other DNA
agtcttgtgctctcctgtct

SEQ ID NO: 49126 - DNA, 20 bp, synthetic construct
  misc_feature 1..20: note = chemically synthesized
  source 1..20: mol_type = other DNA
gtgctctcctgtctcagtct

SEQ ID NO: 49127 - DNA, 20 bp, synthetic construct
  misc_feature 1..20: note = chemically synthesized
  source 1..20: mol_type = other DNA
ctgtctcagtctcagtccct

SEQ ID NO: 49128 - DNA, 20 bp, synthetic construct
  misc_feature 1..20: note = chemically synthesized
  source 1..20: mol_type = other DNA
agtctcagtcccttagactt

SEQ ID NO: 49129 - DNA, 20 bp, synthetic construct
  misc_feature 1..20: note = chemically synthesized
  source 1..20: mol_type = other DNA
tcccttagacttgagtccca

SEQ ID NO: 49130 - DNA, 20 bp, synthetic construct
  misc_feature 1..20: note = chemically synthesized
  source 1..20: mol_type = other DNA
cttagacttgagtcccaaag

SEQ ID NO: 49131 - DNA, 20 bp, synthetic construct
  misc_feature 1..20: note = chemically synthesized
  source 1..20: mol_type = other DNA
agtcccaaagtagcgaattc

SEQ ID NO: 49132 - DNA, 20 bp, synthetic construct
  misc_feature 1..20: note = chemically synthesized
  source 1..20: mol_type = other DNA
cccaaagtagcgaattcaag

SEQ ID NO: 49133 - DNA, 20 bp, synthetic construct
  misc_feature 1..20: note = chemically synthesized
  source 1..20: mol_type = other DNA
ccaaagtagcgaattcaagt

SEQ ID NO: 49134 - DNA, 20 bp, synthetic construct
  misc_feature 1..20: note = chemically synthesized
  source 1..20: mol_type = other DNA
ttcaagtaggatttaatcaa

SEQ ID NO: 49135 - DNA, 20 bp, synthetic construct
  misc_feature 1..20: note = chemically synthesized
  source 1..20: mol_type = other DNA
aagtaggatttaatcaatgg

SEQ ID NO: 49136 - DNA, 20 bp, synthetic construct
  misc_feature 1..20: note = chemically synthesized
  source 1..20: mol_type = other DNA
atttaatcaatggaagaccc

SEQ ID NO: 49137 - DNA, 20 bp, synthetic construct
  misc_feature 1..20: note = chemically synthesized
  source 1..20: mol_type = other DNA
tcaatggaagaccccagtct

SEQ ID NO: 49138 - DNA, 20 bp, synthetic construct
  misc_feature 1..20: note = chemically synthesized
  source 1..20: mol_type = other DNA
accccagtctaagtgttgct

SEQ ID NO: 49139 - DNA, 20 bp, synthetic construct
  misc_feature 1..20: note = chemically synthesized
  source 1..20: mol_type = other DNA
agtgttgctcagaaactccc

SEQ ID NO: 49140 - DNA, 20 bp, synthetic construct
  misc_feature 1..20: note = chemically synthesized
  source 1..20: mol_type = other DNA
atctgtcccaaatgtatatt

SEQ ID NO: 49141 - DNA, 20 bp, synthetic construct
  misc_feature 1..20: note = chemically synthesized
  source 1..20: mol_type = other DNA
aatgtatattcagatcatcc

SEQ ID NO: 49142 - DNA, 20 bp, synthetic construct
  misc_feature 1..20: note = chemically synthesized
  source 1..20: mol_type = other DNA
atgtatattcagatcatcca

SEQ ID NO: 49143 - DNA, 20 bp, synthetic construct
  misc_feature 1..20: note = chemically synthesized
  source 1..20: mol_type = other DNA
tgtatattcagatcatccaa

SEQ ID NO: 49144 - DNA, 20 bp, synthetic construct
  misc_feature 1..20: note = chemically synthesized
  source 1..20: mol_type = other DNA
gtatattcagatcatccaag

SEQ ID NO: 49145 - DNA, 20 bp, synthetic construct
  misc_feature 1..20: note = chemically synthesized
  source 1..20: mol_type = other DNA
gatcatccaaggggacttct

SEQ ID NO: 49146 - DNA, 20 bp, synthetic construct
  misc_feature 1..20: note = chemically synthesized
  source 1..20: mol_type = other DNA
atcatccaaggggacttctt

SEQ ID NO: 49147 - DNA, 20 bp, synthetic construct
  misc_feature 1..20: note = chemically synthesized
  source 1..20: mol_type = other DNA
tcatccaaggggacttcttg

SEQ ID NO: 49148 - DNA, 20 bp, synthetic construct
  misc_feature 1..20: note = chemically synthesized
  source 1..20: mol_type = other DNA
aaggggacttcttggggctt

SEQ ID NO: 49149 - DNA, 20 bp, synthetic construct
  misc_feature 1..20: note = chemically synthesized
  source 1..20: mol_type = other DNA
acttcttggggcttgagttc

SEQ ID NO: 49150 - DNA, 20 bp, synthetic construct
  misc_feature 1..20: note = chemically synthesized
  source 1..20: mol_type = other DNA
ttggggcttgagttccagat

SEQ ID NO: 49151 - DNA, 20 bp, synthetic construct
  misc_feature 1..20: note = chemically synthesized
  source 1..20: mol_type = other DNA
gggcttgagttccagatcag

SEQ ID NO: 49152 - DNA, 20 bp, synthetic construct
  misc_feature 1..20: note = chemically synthesized
  source 1..20: mol_type = other DNA
ttgagttccagatcagcagc

SEQ ID NO: 49153 - DNA, 20 bp, synthetic construct
  misc_feature 1..20: note = chemically synthesized
  source 1..20: mol_type = other DNA
tgagttccagatcagcagca

SEQ ID NO: 49154 - DNA, 20 bp, synthetic construct
  misc_feature 1..20: note = chemically synthesized
  source 1..20: mol_type = other DNA
gagttccagatcagcagcaa

SEQ ID NO: 49155 - DNA, 20 bp, synthetic construct
  misc_feature 1..20: note = chemically synthesized
  source 1..20: mol_type = other DNA
gttccagatcagcagcaagg

SEQ ID NO: 49156 - DNA, 20 bp, synthetic construct
  misc_feature 1..20: note = chemically synthesized
  source 1..20: mol_type = other DNA
atcagcagcaagggagccat

SEQ ID NO: 49157 - DNA, 20 bp, synthetic construct
  misc_feature 1..20: note = chemically synthesized
  source 1..20: mol_type = other DNA
cataagtgccataactacct

SEQ ID NO: 49158 - DNA, 20 bp, synthetic construct
  misc_feature 1..20: note = chemically synthesized
  source 1..20: mol_type = other DNA
cctcagaccactcaccctcc

SEQ ID NO: 49159 - DNA, 20 bp, synthetic construct
  misc_feature 1..20: note = chemically synthesized
  source 1..20: mol_type = other DNA
ctcagaccactcaccctcct

SEQ ID NO: 49160 - DNA, 20 bp, synthetic construct
  misc_feature 1..20: note = chemically synthesized
  source 1..20: mol_type = other DNA
tcagaccactcaccctcctg

SEQ ID NO: 49161 - DNA, 20 bp, synthetic construct
  misc_feature 1..20: note = chemically synthesized
  source 1..20: mol_type = other DNA
ctcaccctcctggggtgtcc

SEQ ID NO: 49162 - DNA, 20 bp, synthetic construct
  misc_feature 1..20: note = chemically synthesized
  source 1..20: mol_type = other DNA
accctcctggggtgtcccgg

SEQ ID NO: 49163 - DNA, 20 bp, synthetic construct
  misc_feature 1..20: note = chemically synthesized
  source 1..20: mol_type = other DNA
tcctggggtgtcccggtggc

SEQ ID NO: 49164 - DNA, 20 bp, synthetic construct
  misc_feature 1..20: note = chemically synthesized
  source 1..20: mol_type = other DNA
cctggggtgtcccggtggcc

SEQ ID NO: 49165 - DNA, 20 bp, synthetic construct
  misc_feature 1..20: note = chemically synthesized
  source 1..20: mol_type = other DNA
ctggggtgtcccggtggcca

SEQ ID NO: 49166 - DNA, 20 bp, synthetic construct
  misc_feature 1..20: note = chemically synthesized
  source 1..20: mol_type = other DNA
gtcccggtggccagggacta

SEQ ID NO: 49167 - DNA, 20 bp, synthetic construct
  misc_feature 1..20: note = chemically synthesized
  source 1..20: mol_type = other DNA
ccggtggccagggactaaag

SEQ ID NO: 49168 - DNA, 20 bp, synthetic construct
  misc_feature 1..20: note = chemically synthesized
  source 1..20: mol_type = other DNA
gactaaagtggtgatttttc

SEQ ID NO: 49169 - DNA, 20 bp, synthetic construct
  misc_feature 1..20: note = chemically synthesized
  source 1..20: mol_type = other DNA
taaagtggtgatttttctgg

SEQ ID NO: 49170 - DNA, 20 bp, synthetic construct
  misc_feature 1..20: note = chemically synthesized
  source 1..20: mol_type = other DNA
aaagtggtgatttttctggt

SEQ ID NO: 49171 - DNA, 20 bp, synthetic construct
  misc_feature 1..20: note = chemically synthesized
  source 1..20: mol_type = other DNA
aagtggtgatttttctggta

SEQ ID NO: 49172 - DNA, 20 bp, synthetic construct
  misc_feature 1..20: note = chemically synthesized
  source 1..20: mol_type = other DNA
tggtgatttttctggtaggg

SEQ ID NO: 49173 - DNA, 20 bp, synthetic construct
  misc_feature 1..20: note = chemically synthesized
  source 1..20: mol_type = other DNA
ggtgatttttctggtaggga

SEQ ID NO: 49174 - DNA, 20 bp, synthetic construct
  misc_feature 1..20: note = chemically synthesized
  source 1..20: mol_type = other DNA
tgatttttctggtagggaag

SEQ ID NO: 49175 - DNA, 20 bp, synthetic construct
  misc_feature 1..20: note = chemically synthesized
  source 1..20: mol_type = other DNA
gatttttctggtagggaagg

SEQ ID NO: 49176 - DNA, 20 bp, synthetic construct
  misc_feature 1..20: note = chemically synthesized
  source 1..20: mol_type = other DNA
ttttctggtagggaaggagg

SEQ ID NO: 49177 - DNA, 20 bp, synthetic construct
  misc_feature 1..20: note = chemically synthesized
  source 1..20: mol_type = other DNA
ttctggtagggaaggaggta

SEQ ID NO: 49178 - DNA, 20 bp, synthetic construct
  misc_feature 1..20: note = chemically synthesized
  source 1..20: mol_type = other DNA
tctggtagggaaggaggtag

SEQ ID NO: 49179 - DNA, 20 bp, synthetic construct
  misc_feature 1..20: note = chemically synthesized
  source 1..20: mol_type = other DNA
ctggtagggaaggaggtaga

SEQ ID NO: 49180 - DNA, 20 bp, synthetic construct
  misc_feature 1..20: note = chemically synthesized
  source 1..20: mol_type = other DNA
agggaaggaggtagagggta

SEQ ID NO: 49181 - DNA, 20 bp, synthetic construct
  misc_feature 1..20: note = chemically synthesized
  source 1..20: mol_type = other DNA
gggaaggaggtagagggtac

SEQ ID NO: 49182 - DNA, 20 bp, synthetic construct
  misc_feature 1..20: note = chemically synthesized
  source 1..20: mol_type = other DNA
aggaggtagagggtacagga

SEQ ID NO: 49183 - DNA, 20 bp, synthetic construct
  misc_feature 1..20: note = chemically synthesized
  source 1..20: mol_type = other DNA
gaggtagagggtacaggaca

SEQ ID NO: 49184 - DNA, 20 bp, synthetic construct
  misc_feature 1..20: note = chemically synthesized
  source 1..20: mol_type = other DNA
actaactgcacacaatatct

SEQ ID NO: 49185 - DNA, 20 bp, synthetic construct
  misc_feature 1..20: note = chemically synthesized
  source 1..20: mol_type = other DNA
ctgcacacaatatctgagac

SEQ ID NO: 49186 - DNA, 20 bp, synthetic construct
  misc_feature 1..20: note = chemically synthesized
  source 1..20: mol_type = other DNA
gcacacaatatctgagactg

SEQ ID NO: 49187 - DNA, 20 bp, synthetic construct
  misc_feature 1..20: note = chemically synthesized
  source 1..20: mol_type = other DNA
caatatctgagactggagct

SEQ ID NO: 49188 - DNA, 20 bp, synthetic construct
  misc_feature 1..20: note = chemically synthesized
  source 1..20: mol_type = other DNA
gctcagatattgctgatgat

SEQ ID NO: 49189 - DNA, 20 bp, synthetic construct
  misc_feature 1..20: note = chemically synthesized
  source 1..20: mol_type = other DNA
tcagatattgctgatgatca

SEQ ID NO: 49190 - DNA, 20 bp, synthetic construct
  misc_feature 1..20: note = chemically synthesized
  source 1..20: mol_type = other DNA
atattgctgatgatcagagt

SEQ ID NO: 49191 - DNA, 20 bp, synthetic construct
  misc_feature 1..20: note = chemically synthesized
  source 1..20: mol_type = other DNA
ctccccaattgatttacaac

SEQ ID NO: 49192 - DNA, 20 bp, synthetic construct
  misc_feature 1..20: note = chemically synthesized
  source 1..20: mol_type = other DNA
tccccaattgatttacaact

SEQ ID NO: 49193 - DNA, 20 bp, synthetic construct
  misc_feature 1..20: note = chemically synthesized
  source 1..20: mol_type = other DNA
ccccaattgatttacaactg

SEQ ID NO: 49194 - DNA, 20 bp, synthetic construct
  misc_feature 1..20: note = chemically synthesized
  source 1..20: mol_type = other DNA
attgatttacaactggggct

SEQ ID NO: 49195 - DNA, 20 bp, synthetic construct
  misc_feature 1..20: note = chemically synthesized
  source 1..20: mol_type = other DNA
ggcttggatactgttttaaa

SEQ ID NO: 49196 - DNA, 20 bp, synthetic construct
  misc_feature 1..20: note = chemically synthesized
  source 1..20: mol_type = other DNA
gcttggatactgttttaaac

SEQ ID NO: 49197 - DNA, 20 bp, synthetic construct
  misc_feature 1..20: note = chemically synthesized
  source 1..20: mol_type = other DNA
ttggatactgttttaaacgg

SEQ ID NO: 49198 - DNA, 20 bp, synthetic construct
  misc_feature 1..20: note = chemically synthesized
  source 1..20: mol_type = other DNA
tggatactgttttaaacggg

SEQ ID NO: 49199 - DNA, 20 bp, synthetic construct
  misc_feature 1..20: note = chemically synthesized
  source 1..20: mol_type = other DNA
gatactgttttaaacgggag

SEQ ID NO: 49200 - DNA, 20 bp, synthetic construct
  misc_feature 1..20: note = chemically synthesized
  source 1..20: mol_type = other DNA
aaccactgacgtgactacac

SEQ ID NO: 49201 - DNA, 20 bp, synthetic construct
  misc_feature 1..20: note = chemically synthesized
  source 1..20: mol_type = other DNA
ccactgacgtgactacacta

SEQ ID NO: 49202 - DNA, 20 bp, synthetic construct
  misc_feature 1..20: note = chemically synthesized
  source 1..20: mol_type = other DNA
tgacgtgactacactagaga

SEQ ID NO: 49203 - DNA, 20 bp, synthetic construct
  misc_feature 1..20: note = chemically synthesized
  source 1..20: mol_type = other DNA
ccactcttgctttacttcat

SEQ ID NO: 49204 - DNA, 20 bp, synthetic construct
  misc_feature 1..20: note = chemically synthesized
  source 1..20: mol_type = other DNA
cttcatgagaacgaaaatgt

SEQ ID NO: 49205 - DNA, 20 bp, synthetic construct
  misc_feature 1..20: note = chemically synthesized
  source 1..20: mol_type = other DNA
ttgcaccatgaattcatttg

SEQ ID NO: 49206 - DNA, 20 bp, synthetic construct
  misc_feature 1..20: note = chemically synthesized
  source 1..20: mol_type = other DNA
accatgaattcatttgcgga

SEQ ID NO: 49207 - DNA, 20 bp, synthetic construct
  misc_feature 1..20: note = chemically synthesized
  source 1..20: mol_type = other DNA
ttattttattttattttatt

SEQ ID NO: 49208 - DNA, 20 bp, synthetic construct
  misc_feature 1..20: note = chemically synthesized
  source 1..20: mol_type = other DNA
ttttattgagactctcaccc

SEQ ID NO: 49209 - DNA, 20 bp, synthetic construct
  misc_feature 1..20: note = chemically synthesized
  source 1..20: mol_type = other DNA
tgagactctcaccccggttg

SEQ ID NO: 49210 - DNA, 20 bp, synthetic construct
  misc_feature 1..20: note = chemically synthesized
  source 1..20: mol_type = other DNA
gaagtgcactgacgtgattt

SEQ ID NO: 49211 - DNA, 20 bp, synthetic construct
  misc_feature 1..20: note = chemically synthesized
  source 1..20: mol_type = other DNA
tcactgcaacttccacctcc

SEQ ID NO: 49212 - DNA, 20 bp, synthetic construct
  misc_feature 1..20: note = chemically synthesized
  source 1..20: mol_type = other DNA
cactgcaacttccacctcct

SEQ ID NO: 49213 - DNA, 20 bp, synthetic construct
  misc_feature 1..20: note = chemically synthesized
  source 1..20: mol_type = other DNA
aacttccacctcctgggttc

SEQ ID NO: 49214 - DNA, 20 bp, synthetic construct
  misc_feature 1..20: note = chemically synthesized
  source 1..20: mol_type = other DNA
ctgggttcaagtgaatactc

SEQ ID NO: 49215 - DNA, 20 bp, synthetic construct
  misc_feature 1..20: note = chemically synthesized
  source 1..20: mol_type = other DNA
agtgaatactccagcctccc

SEQ ID NO: 49216 - DNA, 20 bp, synthetic construct
  misc_feature 1..20: note = chemically synthesized
  source 1..20: mol_type = other DNA
gaatactccagcctccctag

SEQ ID NO: 49217 - DNA, 20 bp, synthetic construct
  misc_feature 1..20: note = chemically synthesized
  source 1..20: mol_type = other DNA
actccagcctccctagtagc

SEQ ID NO: 49218 - DNA, 20 bp, synthetic construct
  misc_feature 1..20: note = chemically synthesized
  source 1..20: mol_type = other DNA
ctccagcctccctagtagct

SEQ ID NO: 49219 - DNA, 20 bp, synthetic construct
  misc_feature 1..20: note = chemically synthesized
  source 1..20: mol_type = other DNA
ctccctagtagctgggatta

SEQ ID NO: 49220 - DNA, 20 bp, synthetic construct
  misc_feature 1..20: note = chemically synthesized
  source 1..20: mol_type = other DNA
tccctagtagctgggattac

SEQ ID NO: 49221 - DNA, 20 bp, synthetic construct
  misc_feature 1..20: note = chemically synthesized
  source 1..20: mol_type = other DNA
caggtgcccaccaccacgcc

SEQ ID NO: 49222 - DNA, 20 bp, synthetic construct
  misc_feature 1..20: note = chemically synthesized
  source 1..20: mol_type = other DNA
ctggctaatttttgtatttt

SEQ ID NO: 49223 - DNA, 20 bp, synthetic construct
  misc_feature 1..20: note = chemically synthesized
  source 1..20: mol_type = other DNA
gctaatttttgtatttttag

SEQ ID NO: 49224 - DNA, 20 bp, synthetic construct
  misc_feature 1..20: note = chemically synthesized
  source 1..20: mol_type = other DNA
taatttttgtatttttagta

SEQ ID NO: 49225 - DNA, 20 bp, synthetic construct
  misc_feature 1..20: note = chemically synthesized
  source 1..20: mol_type = other DNA
ttttgtatttttagtagaga

SEQ ID NO: 49226 - DNA, 20 bp, synthetic construct
  misc_feature 1..20: note = chemically synthesized
  source 1..20: mol_type = other DNA
tttgtatttttagtagagat

SEQ ID NO: 49227 - DNA, 20 bp, synthetic construct
  misc_feature 1..20: note = chemically synthesized
  source 1..20: mol_type = other DNA
ttgtatttttagtagagatg

SEQ ID NO: 49228 - DNA, 20 bp, synthetic construct
  misc_feature 1..20: note = chemically synthesized
  source 1..20: mol_type = other DNA
gagatggggtttcaccacat

SEQ ID NO: 49229 - DNA, 20 bp, synthetic construct
  misc_feature 1..20: note = chemically synthesized
  source 1..20: mol_type = other DNA
ggggtttcaccacattggcc

SEQ ID NO: 49230 - DNA, 20 bp, synthetic construct
  misc_feature 1..20: note = chemically synthesized
  source 1..20: mol_type = other DNA
tttcaccacattggcctggc

SEQ ID NO: 49231 - DNA, 20 bp, synthetic construct
  misc_feature 1..20: note = chemically synthesized
  source 1..20: mol_type = other DNA
accttgtgatccacctgtct

SEQ ID NO: 49232 - DNA, 20 bp, synthetic construct
  misc_feature 1..20: note = chemically synthesized
  source 1..20: mol_type = other DNA
ccacctgtcttggcctccca

SEQ ID NO: 49233 - DNA, 20 bp, synthetic construct
  misc_feature 1..20: note = chemically synthesized
  source 1..20: mol_type = other DNA
gtcttggcctcccaaagtgc

SEQ ID NO: 49234 - DNA, 20 bp, synthetic construct
  misc_feature 1..20: note = chemically synthesized
  source 1..20: mol_type = other DNA
tcttggcctcccaaagtgct

SEQ ID NO: 49235 - DNA, 20 bp, synthetic construct
  misc_feature 1..20: note = chemically synthesized
  source 1..20: mol_type = other DNA
ctcccaaagtgctgggatta

SEQ ID NO: 49236 - DNA, 20 bp, synthetic construct
  misc_feature 1..20: note = chemically synthesized
  source 1..20: mol_type = other DNA
cccaaagtgctgggattaca

SEQ ID NO: 49237 - DNA, 20 bp, synthetic construct
  misc_feature 1..20: note = chemically synthesized
  source 1..20: mol_type = other DNA
agtgctgggattacagagtt

SEQ ID NO: 49238 - DNA, 20 bp, synthetic construct
  misc_feature 1..20: note = chemically synthesized
  source 1..20: mol_type = other DNA
aaatatttatttatttattt

SEQ ID NO: 49239 - DNA, 20 bp, synthetic construct
  misc_feature 1..20: note = chemically synthesized
  source 1..20: mol_type = other DNA
tttatttaagccacaactac

SEQ ID NO: 49240 - DNA, 20 bp, synthetic construct
  misc_feature 1..20: note = chemically synthesized
  source 1..20: mol_type = other DNA
ttaagccacaactactagaa

SEQ ID NO: 49241 - DNA, 20 bp, synthetic construct
  misc_feature 1..20: note = chemically synthesized
  source 1..20: mol_type = other DNA
taagccacaactactagaat

SEQ ID NO: 49242 - DNA, 20 bp, synthetic construct
  misc_feature 1..20: note = chemically synthesized
  source 1..20: mol_type = other DNA
gccacaactactagaatagg

SEQ ID NO: 49243 - DNA, 20 bp, synthetic construct
  misc_feature 1..20: note = chemically synthesized
  source 1..20: mol_type = other DNA
ccacaactactagaatagga

SEQ ID NO: 49244 - DNA, 20 bp, synthetic construct
  misc_feature 1..20: note = chemically synthesized
  source 1..20: mol_type = other DNA
gatattttattaattttatt

SEQ ID NO: 49245 - DNA, 20 bp, synthetic construct
  misc_feature 1..20: note = chemically synthesized
  source 1..20: mol_type = other DNA
attatttttttttctttcct

SEQ ID NO: 49246 - DNA, 20 bp, synthetic construct
  misc_feature 1..20: note = chemically synthesized
  source 1..20: mol_type = other DNA
gacattcttgctctgtcacc

SEQ ID NO: 49247 - DNA, 20 bp, synthetic construct
  misc_feature 1..20: note = chemically synthesized
  source 1..20: mol_type = other DNA
acattcttgctctgtcaccc

SEQ ID NO: 49248 - DNA, 20 bp, synthetic construct
  misc_feature 1..20: note = chemically synthesized
  source 1..20: mol_type = other DNA
tcttgctctgtcacccaggc

SEQ ID NO: 49249 - DNA, 20 bp, synthetic construct
  misc_feature 1..20: note = chemically synthesized
  source 1..20: mol_type = other DNA
ttgctctgtcacccaggctg

SEQ ID NO: 49250 - DNA, 20 bp, synthetic construct
  misc_feature 1..20: note = chemically synthesized
  source 1..20: mol_type = other DNA
ctgtcacccaggctggagtg

SEQ ID NO: 49251 - DNA, 20 bp, synthetic construct
  misc_feature 1..20: note = chemically synthesized
  source 1..20: mol_type = other DNA
tcacccaggctggagtgcag

SEQ ID NO: 49252 - DNA, 20 bp, synthetic construct
  misc_feature 1..20: note = chemically synthesized
  source 1..20: mol_type = other DNA
ggagtgcagtggcacattct

SEQ ID NO: 49253 - DNA, 20 bp, synthetic construct
  misc_feature 1..20: note = chemically synthesized
  source 1..20: mol_type = other DNA
aacctccatctcctgtgttc

SEQ ID NO: 49254 - DNA, 20 bp, synthetic construct
  misc_feature 1..20: note = chemically synthesized
  source 1..20: mol_type = other DNA
ctcctgtgttcaagcaattc

SEQ ID NO: 49255 - DNA, 20 bp, synthetic construct
  misc_feature 1..20: note = chemically synthesized
  source 1..20: mol_type = other DNA
ttcaagcaattctagtgcct

SEQ ID NO: 49256 - DNA, 20 bp, synthetic construct
  misc_feature 1..20: note = chemically synthesized
  source 1..20: mol_type = other DNA
ttctagtgcctcagcctact

SEQ ID NO: 49257 - DNA, 20 bp, synthetic construct
  misc_feature 1..20: note = chemically synthesized
  source 1..20: mol_type = other DNA
tagtgcctcagcctacttag

SEQ ID NO: 49258 - DNA, 20 bp, synthetic construct
  misc_feature 1..20: note = chemically synthesized
  source 1..20: mol_type = other DNA
gcctcagcctacttagtagc

SEQ ID NO: 49259 - DNA, 20 bp, synthetic construct
  misc_feature 1..20: note = chemically synthesized
  source 1..20: mol_type = other DNA
cctcagcctacttagtagct

SEQ ID NO: 49260 - DNA, 20 bp, synthetic construct
  misc_feature 1..20: note = chemically synthesized
  source 1..20: mol_type = other DNA
tacttagtagctgggatgac

SEQ ID NO: 49261 - DNA, 20 bp, synthetic construct
  misc_feature 1..20: note = chemically synthesized
  source 1..20: mol_type = other DNA
ctggcatgtgcctccacacc

SEQ ID NO: 49262 - DNA, 20 bp, synthetic construct
  misc_feature 1..20: note = chemically synthesized
  source 1..20: mol_type = other DNA
gctaatttttgtattttttg

SEQ ID NO: 49263 - DNA, 20 bp, synthetic construct
  misc_feature 1..20: note = chemically synthesized
  source 1..20: mol_type = other DNA
taatttttgtattttttgta

SEQ ID NO: 49264 - DNA, 20 bp, synthetic construct
  misc_feature 1..20: note = chemically synthesized
  source 1..20: mol_type = other DNA
ttttgtattttttgtagaga

SEQ ID NO: 49265 - DNA, 20 bp, synthetic construct
  misc_feature 1..20: note = chemically synthesized
  source 1..20: mol_type = other DNA
tttgtattttttgtagagac

SEQ ID NO: 49266 - DNA, 20 bp, synthetic construct
  misc_feature 1..20: note = chemically synthesized
  source 1..20: mol_type = other DNA
ttgtattttttgtagagaca

SEQ ID NO: 49267 - DNA, 20 bp, synthetic construct
  misc_feature 1..20: note = chemically synthesized
  source 1..20: mol_type = other DNA
tttttgtagagacagggttt

SEQ ID NO: 49268 - DNA, 20 bp, synthetic construct
  misc_feature 1..20: note = chemically synthesized
  source 1..20: mol_type = other DNA
cagggttttggcatgttgcc

SEQ ID NO: 49269 - DNA, 20 bp, synthetic construct
  misc_feature 1..20: note = chemically synthesized
  source 1..20: mol_type = other DNA
agggttttggcatgttgccc

SEQ ID NO: 49270 - DNA, 20 bp, synthetic construct
  misc_feature 1..20: note = chemically synthesized
  source 1..20: mol_type = other DNA
ccaggcttgtctcaaactcc

SEQ ID NO: 49271 - DNA, 20 bp, synthetic construct
  misc_feature 1..20: note = chemically synthesized
  source 1..20: mol_type = other DNA
ttgtctcaaactcctggcct

SEQ ID NO: 49272 - DNA, 20 bp, synthetic construct
  misc_feature 1..20: note = chemically synthesized
  source 1..20: mol_type = other DNA
tgtctcaaactcctggcctc

SEQ ID NO: 49273 - DNA, 20 bp, synthetic construct
  misc_feature 1..20: note = chemically synthesized
  source 1..20: mol_type = other DNA
ctcaggtgatccatctgccg

SEQ ID NO: 49274 - DNA, 20 bp, synthetic construct
  misc_feature 1..20: note = chemically synthesized
  source 1..20: mol_type = other DNA
gccgtggcctcccaaaatgc

SEQ ID NO: 49275 - DNA, 20 bp, synthetic construct
  misc_feature 1..20: note = chemically synthesized
  source 1..20: mol_type = other DNA
ccgtggcctcccaaaatgct

SEQ ID NO: 49276 - DNA, 20 bp, synthetic construct
  misc_feature 1..20: note = chemically synthesized
  source 1..20: mol_type = other DNA
ctcccaaaatgctgggatta

SEQ ID NO: 49277 - DNA, 20 bp, synthetic construct
  misc_feature 1..20: note = chemically synthesized
  source 1..20: mol_type = other DNA
tcccaaaatgctgggattat

SEQ ID NO: 49278 - DNA, 20 bp, synthetic construct
  misc_feature 1..20: note = chemically synthesized
  source 1..20: mol_type = other DNA
aatgctgggattataggcat

SEQ ID NO: 49279 - DNA, 20 bp, synthetic construct
  misc_feature 1..20: note = chemically synthesized
  source 1..20: mol_type = other DNA
catgagccaccaccccctcc

SEQ ID NO: 49280 - DNA, 20 bp, synthetic construct
  misc_feature 1..20: note = chemically synthesized
  source 1..20: mol_type = other DNA
gagccaccaccccctcctgg

SEQ ID NO: 49281 - DNA, 20 bp, synthetic construct
  misc_feature 1..20: note = chemically synthesized
  source 1..20: mol_type = other DNA
agccaccaccccctcctgga

SEQ ID NO: 49282 - DNA, 20 bp, synthetic construct
  misc_feature 1..20: note = chemically synthesized
  source 1..20: mol_type = other DNA
tataacataatttataatta

SEQ ID NO: 49283 - DNA, 20 bp, synthetic construct
  misc_feature 1..20: note = chemically synthesized
  source 1..20: mol_type = other DNA
tataattacagaaaacatgt

SEQ ID NO: 49284 - DNA, 20 bp, synthetic construct
  misc_feature 1..20: note = chemically synthesized
  source 1..20: mol_type = other DNA
cagaaaacatgtgagttcac

SEQ ID NO: 49285 - DNA, 20 bp, synthetic construct
  misc_feature 1..20: note = chemically synthesized
  source 1..20: mol_type = other DNA
agaaaacatgtgagttcact

SEQ ID NO: 49286 - DNA, 20 bp, synthetic construct
  misc_feature 1..20: note = chemically synthesized
  source 1..20: mol_type = other DNA
ctaggaataaataaattttg

SEQ ID NO: 49287 - DNA, 20 bp, synthetic construct
  misc_feature 1..20: note = chemically synthesized
  source 1..20: mol_type = other DNA
ataaattttgaagataataa

SEQ ID NO: 49288 - DNA, 20 bp, synthetic construct
  misc_feature 1..20: note = chemically synthesized
  source 1..20: mol_type = other DNA
tttcacttatgttgtcattt

SEQ ID NO: 49289 - DNA, 20 bp, synthetic construct
  misc_feature 1..20: note = chemically synthesized
  source 1..20: mol_type = other DNA
cttatgttgtcatttcggca

SEQ ID NO: 49290 - DNA, 20 bp, synthetic construct
  misc_feature 1..20: note = chemically synthesized
  source 1..20: mol_type = other DNA
gttgtcatttcggcacagtt

SEQ ID NO: 49291 - DNA, 20 bp, synthetic construct
  misc_feature 1..20: note = chemically synthesized
  source 1..20: mol_type = other DNA
catttcggcacagtttggta

SEQ ID NO: 49292 - DNA, 20 bp, synthetic construct
  misc_feature 1..20: note = chemically synthesized
  source 1..20: mol_type = other DNA
atttcggcacagtttggtat

SEQ ID NO: 49293 - DNA, 20 bp, synthetic construct
  misc_feature 1..20: note = chemically synthesized
  source 1..20: mol_type = other DNA
gcacagtttggtataggatg

SEQ ID NO: 49294 - DNA, 20 bp, synthetic construct
  misc_feature 1..20: note = chemically synthesized
  source 1..20: mol_type = other DNA
acagtttggtataggatgtg

SEQ ID NO: 49295 - DNA, 20 bp, synthetic construct
  misc_feature 1..20: note = chemically synthesized
  source 1..20: mol_type = other DNA
gagatgttaacatttatacc

SEQ ID NO: 49296 - DNA, 20 bp, synthetic construct
  misc_feature 1..20: note = chemically synthesized
  source 1..20: mol_type = other DNA
acctagcttgctcgtaaact

SEQ ID NO: 49297 - DNA, 20 bp, synthetic construct
  misc_feature 1..20: note = chemically synthesized
  source 1..20: mol_type = other DNA
gctcgtaaactaagacctga

SEQ ID NO: 49298 - DNA, 20 bp, synthetic construct
  misc_feature 1..20: note = chemically synthesized
  source 1..20: mol_type = other DNA
ctcgtaaactaagacctgaa

SEQ ID NO: 49299 - DNA, 20 bp, synthetic construct
  misc_feature 1..20: note = chemically synthesized
  source 1..20: mol_type = other DNA
tcgtaaactaagacctgaaa

SEQ ID NO: 49300 - DNA, 20 bp, synthetic construct
  misc_feature 1..20: note = chemically synthesized
  source 1..20: mol_type = other DNA
cctgaaagggttgtgtctat

SEQ ID NO: 49301 - DNA, 20 bp, synthetic construct
  misc_feature 1..20: note = chemically synthesized
  source 1..20: mol_type = other DNA
gtgtctatcagctgcacccc

SEQ ID NO: 49302 - DNA, 20 bp, synthetic construct
  misc_feature 1..20: note = chemically synthesized
  source 1..20: mol_type = other DNA
tgtctatcagctgcacccct

SEQ ID NO: 49303 - DNA, 20 bp, synthetic construct
  misc_feature 1..20: note = chemically synthesized
  source 1..20: mol_type = other DNA
ctatcagctgcacccctggg

SEQ ID NO: 49304 - DNA, 20 bp, synthetic construct
  misc_feature 1..20: note = chemically synthesized
  source 1..20: mol_type = other DNA
cctgggtagcgacacaacct

SEQ ID NO: 49305 - DNA, 20 bp, synthetic construct
  misc_feature 1..20: note = chemically synthesized
  source 1..20: mol_type = other DNA
ctgggtagcgacacaacctc

SEQ ID NO: 49306 - DNA, 20 bp, synthetic construct
  misc_feature 1..20: note = chemically synthesized
  source 1..20: mol_type = other DNA
ggtagcgacacaacctcggg

SEQ ID NO: 49307 - DNA, 20 bp, synthetic construct
  misc_feature 1..20: note = chemically synthesized
  source 1..20: mol_type = other DNA
gtagcgacacaacctcggga

SEQ ID NO: 49308 - DNA, 20 bp, synthetic construct
  misc_feature 1..20: note = chemically synthesized
  source 1..20: mol_type = other DNA
acacaacctcgggaaggcct

SEQ ID NO: 49309 - DNA, 20 bp, synthetic construct
  misc_feature 1..20: note = chemically synthesized
  source 1..20: mol_type = other DNA
gcctcagccccctcctcgta

SEQ ID NO: 49310 - DNA, 20 bp, synthetic construct
  misc_feature 1..20: note = chemically synthesized
  source 1..20: mol_type = other DNA
cctcgtacagcactgcctgt

SEQ ID NO: 49311 - DNA, 20 bp, synthetic construct
  misc_feature 1..20: note = chemically synthesized
  source 1..20: mol_type = other DNA
gtacagcactgcctgttgga

SEQ ID NO: 49312 - DNA, 20 bp, synthetic construct
  misc_feature 1..20: note = chemically synthesized
  source 1..20: mol_type = other DNA
cactgcctgttggaaagctt

SEQ ID NO: 49313 - DNA, 20 bp, synthetic construct
  misc_feature 1..20: note = chemically synthesized
  source 1..20: mol_type = other DNA
actgcctgttggaaagcttg

SEQ ID NO: 49314 - DNA, 20 bp, synthetic construct
  misc_feature 1..20: note = chemically synthesized
  source 1..20: mol_type = other DNA
ctgcctgttggaaagcttga

SEQ ID NO: 49315 - DNA, 20 bp, synthetic construct
  misc_feature 1..20: note = chemically synthesized
  source 1..20: mol_type = other DNA
gcctgttggaaagcttgagg

SEQ ID NO: 49316 - DNA, 20 bp, synthetic construct
  misc_feature 1..20: note = chemically synthesized
  source 1..20: mol_type = other DNA
cctgttggaaagcttgaggg

SEQ ID NO: 49317 - DNA, 20 bp, synthetic construct
  misc_feature 1..20: note = chemically synthesized
  source 1..20: mol_type = other DNA
ggaaagcttgagggaggcta

SEQ ID NO: 49318 - DNA, 20 bp, synthetic construct
  misc_feature 1..20: note = chemically synthesized
  source 1..20: mol_type = other DNA
tgagggaggctatggatgtg

SEQ ID NO: 49319 - DNA, 20 bp, synthetic construct
  misc_feature 1..20: note = chemically synthesized
  source 1..20: mol_type = other DNA
ggctatggatgtgcagcact

SEQ ID NO: 49320 - DNA, 20 bp, synthetic construct
  misc_feature 1..20: note = chemically synthesized
  source 1..20: mol_type = other DNA
tatggatgtgcagcacttgg

SEQ ID NO: 49321 - DNA, 20 bp, synthetic construct
  misc_feature 1..20: note = chemically synthesized
  source 1..20: mol_type = other DNA
tggatgtgcagcacttggca

SEQ ID NO: 49322 - DNA, 20 bp, synthetic construct
  misc_feature 1..20: note = chemically synthesized
  source 1..20: mol_type = other DNA
ggatgtgcagcacttggcag

SEQ ID NO: 49323 - DNA, 20 bp, synthetic construct
  misc_feature 1..20: note = chemically synthesized
  source 1..20: mol_type = other DNA
gatgtgcagcacttggcaga

SEQ ID NO: 49324 - DNA, 20 bp, synthetic construct
  misc_feature 1..20: note = chemically synthesized
  source 1..20: mol_type = other DNA
gcagcacttggcagagggtc

SEQ ID NO: 49325 - DNA, 20 bp, synthetic construct
  misc_feature 1..20: note = chemically synthesized
  source 1..20: mol_type = other DNA
cttggcagagggtctggtca

SEQ ID NO: 49326 - DNA, 20 bp, synthetic construct
  misc_feature 1..20: note = chemically synthesized
  source 1..20: mol_type = other DNA
ggcagagggtctggtcatgg

SEQ ID NO: 49327 - DNA, 20 bp, synthetic construct
  misc_feature 1..20: note = chemically synthesized
  source 1..20: mol_type = other DNA
ggtctggtcatggaagttac

SEQ ID NO: 49328 - DNA, 20 bp, synthetic construct
  misc_feature 1..20: note = chemically synthesized
  source 1..20: mol_type = other DNA
tggaagttaccagcaaatat

SEQ ID NO: 49329 - DNA, 20 bp, synthetic construct
  misc_feature 1..20: note = chemically synthesized
  source 1..20: mol_type = other DNA
tatgattttattttatccaa

SEQ ID NO: 49330 - DNA, 20 bp, synthetic construct
  misc_feature 1..20: note = chemically synthesized
  source 1..20: mol_type = other DNA
attttattttatccaaaaga

SEQ ID NO: 49331 - DNA, 20 bp, synthetic construct
  misc_feature 1..20: note = chemically synthesized
  source 1..20: mol_type = other DNA
tttattttatccaaaagaaa

SEQ ID NO: 49332 - DNA, 20 bp, synthetic construct
  misc_feature 1..20: note = chemically synthesized
  source 1..20: mol_type = other DNA
atccaaaagaaagagaatga

SEQ ID NO: 49333 - DNA, 20 bp, synthetic construct
  misc_feature 1..20: note = chemically synthesized
  source 1..20: mol_type = other DNA
caaaagaaagagaatgaaag

SEQ ID NO: 49334 - DNA, 20 bp, synthetic construct
  misc_feature 1..20: note = chemically synthesized
  source 1..20: mol_type = other DNA
aaagaaagagaatgaaagaa

SEQ ID NO: 49335 - DNA, 20 bp, synthetic construct
  misc_feature 1..20: note = chemically synthesized
  source 1..20: mol_type = other DNA
aagaaagagaatgaaagaag

SEQ ID NO: 49336 - DNA, 20 bp, synthetic construct
  misc_feature 1..20: note = chemically synthesized
  source 1..20: mol_type = other DNA
agaaagagaatgaaagaaga

SEQ ID NO: 49337 - DNA, 20 bp, synthetic construct
  misc_feature 1..20: note = chemically synthesized
  source 1..20: mol_type = other DNA
gaaagagaatgaaagaagag

SEQ ID NO: 49338 - DNA, 20 bp, synthetic construct
  misc_feature 1..20: note = chemically synthesized
  source 1..20: mol_type = other DNA
aagagaatgaaagaagaggg

SEQ ID NO: 49339 - DNA, 20 bp, synthetic construct
  misc_feature 1..20: note = chemically synthesized
  source 1..20: mol_type = other DNA
agagaatgaaagaagagggg

SEQ ID NO: 49340 - DNA, 20 bp, synthetic construct
  misc_feature 1..20: note = chemically synthesized
  source 1..20: mol_type = other DNA
gaaagaagaggggaggaaac

SEQ ID NO: 49341 - DNA, 20 bp, synthetic construct
  misc_feature 1..20: note = chemically synthesized
  source 1..20: mol_type = other DNA
ggggaggaaacaagactaat

SEQ ID NO: 49342 - DNA, 20 bp, synthetic construct
  misc_feature 1..20: note = chemically synthesized
  source 1..20: mol_type = other DNA
gggaggaaacaagactaatc

SEQ ID NO: 49343 - DNA, 20 bp, synthetic construct
  misc_feature 1..20: note = chemically synthesized
  source 1..20: mol_type = other DNA
ggaaacaagactaatcagga

SEQ ID NO: 49344 - DNA, 20 bp, synthetic construct
  misc_feature 1..20: note = chemically synthesized
  source 1..20: mol_type = other DNA
aagactaatcaggaaagatg

SEQ ID NO: 49345 - DNA, 20 bp, synthetic construct
  misc_feature 1..20: note = chemically synthesized
  source 1..20: mol_type = other DNA
agactaatcaggaaagatga

SEQ ID NO: 49346 - DNA, 20 bp, synthetic construct
  misc_feature 1..20: note = chemically synthesized
  source 1..20: mol_type = other DNA
aatcaggaaagatgaaggtc

SEQ ID NO: 49347 - DNA, 20 bp, synthetic construct
  misc_feature 1..20: note = chemically synthesized
  source 1..20: mol_type = other DNA
atcaggaaagatgaaggtct

SEQ ID NO: 49348 - DNA, 20 bp, synthetic construct
  misc_feature 1..20: note = chemically synthesized
  source 1..20: mol_type = other DNA
tcaggaaagatgaaggtcta

SEQ ID NO: 49349 - DNA, 20 bp, synthetic construct
  misc_feature 1..20: note = chemically synthesized
  source 1..20: mol_type = other DNA
caggaaagatgaaggtctag

SEQ ID NO: 49350 - DNA, 20 bp, synthetic construct
  misc_feature 1..20: note = chemically synthesized
  source 1..20: mol_type = other DNA
aaagatgaaggtctaggggt

SEQ ID NO: 49351 - DNA, 20 bp, synthetic construct
  misc_feature 1..20: note = chemically synthesized
  source 1..20: mol_type = other DNA
aagatgaaggtctaggggtg

SEQ ID NO: 49352 - DNA, 20 bp, synthetic construct
  misc_feature 1..20: note = chemically synthesized
  source 1..20: mol_type = other DNA
agatgaaggtctaggggtga

SEQ ID NO: 49353 - DNA, 20 bp, synthetic construct
  misc_feature 1..20: note = chemically synthesized
  source 1..20: mol_type = other DNA
tgaaggtctaggggtgaggg

SEQ ID NO: 49354 - DNA, 20 bp, synthetic construct
  misc_feature 1..20: note = chemically synthesized
  source 1..20: mol_type = other DNA
gaaggtctaggggtgaggga

SEQ ID NO: 49355 - DNA, 20 bp, synthetic construct
  misc_feature 1..20: note = chemically synthesized
  source 1..20: mol_type = other DNA
aggtctaggggtgagggaag

SEQ ID NO: 49356 - DNA, 20 bp, synthetic construct
  misc_feature 1..20: note = chemically synthesized
  source 1..20: mol_type = other DNA
ctaggggtgagggaaggagt

SEQ ID NO: 49357 - DNA, 20 bp, synthetic construct
  misc_feature 1..20: note = chemically synthesized
  source 1..20: mol_type = other DNA
taggggtgagggaaggagta

SEQ ID NO: 49358 - DNA, 20 bp, synthetic construct
  misc_feature 1..20: note = chemically synthesized
  source 1..20: mol_type = other DNA
ggggtgagggaaggagtaag

SEQ ID NO: 49359 - DNA, 20 bp, synthetic construct
  misc_feature 1..20: note = chemically synthesized
  source 1..20: mol_type = other DNA
ggaaggagtaaggagacata

SEQ ID NO: 49360 - DNA, 20 bp, synthetic construct
  misc_feature 1..20: note = chemically synthesized
  source 1..20: mol_type = other DNA
gaaggagtaaggagacataa

SEQ ID NO: 49361 - DNA, 20 bp, synthetic construct
  misc_feature 1..20: note = chemically synthesized
  source 1..20: mol_type = other DNA
aaggagacataaaggcaatg

SEQ ID NO: 49362 - DNA, 20 bp, synthetic construct
  misc_feature 1..20: note = chemically synthesized
  source 1..20: mol_type = other DNA
ggagacataaaggcaatgtg

SEQ ID NO: 49363 - DNA, 20 bp, synthetic construct
  misc_feature 1..20: note = chemically synthesized
  source 1..20: mol_type = other DNA
gacataaaggcaatgtggag

SEQ ID NO: 49364 - DNA, 20 bp, synthetic construct
  misc_feature 1..20: note = chemically synthesized
  source 1..20: mol_type = other DNA
aaaggcaatgtggagcagct

SEQ ID NO: 49365 - DNA, 20 bp, synthetic construct
  misc_feature 1..20: note = chemically synthesized
  source 1..20: mol_type = other DNA
aaggcaatgtggagcagctg

SEQ ID NO: 49366 - DNA, 20 bp, synthetic construct
  misc_feature 1..20: note = chemically synthesized
  source 1..20: mol_type = other DNA
aggcaatgtggagcagctga

SEQ ID NO: 49367 - DNA, 20 bp, synthetic construct
  misc_feature 1..20: note = chemically synthesized
  source 1..20: mol_type = other DNA
ggcaatgtggagcagctgag

SEQ ID NO: 49368 - DNA, 20 bp, synthetic construct
  misc_feature 1..20: note = chemically synthesized
  source 1..20: mol_type = other DNA
gcaatgtggagcagctgagg

SEQ ID NO: 49369 - DNA, 20 bp, synthetic construct
  misc_feature 1..20: note = chemically synthesized
  source 1..20: mol_type = other DNA
caatgtggagcagctgaggg

SEQ ID NO: 49370 - DNA, 20 bp, synthetic construct
  misc_feature 1..20: note = chemically synthesized
  source 1..20: mol_type = other DNA
ggagcagctgaggggggaaa

SEQ ID NO: 49371 - DNA, 20 bp, synthetic construct
  misc_feature 1..20: note = chemically synthesized
  source 1..20: mol_type = other DNA
aaatggctttcaccacttcc

SEQ ID NO: 49372 - DNA, 20 bp, synthetic construct
  misc_feature 1..20: note = chemically synthesized
  source 1..20: mol_type = other DNA
tgcactctcaaatattttat

SEQ ID NO: 49373 - DNA, 20 bp, synthetic construct
  misc_feature 1..20: note = chemically synthesized
  source 1..20: mol_type = other DNA
ttttataagactctatattc

SEQ ID NO: 49374 - DNA, 20 bp, synthetic construct
  misc_feature 1..20: note = chemically synthesized
  source 1..20: mol_type = other DNA
tttataagactctatattca

SEQ ID NO: 49375 - DNA, 20 bp, synthetic construct
  misc_feature 1..20: note = chemically synthesized
  source 1..20: mol_type = other DNA
ggtaatgtttgaaccctgct

SEQ ID NO: 49376 - DNA, 20 bp, synthetic construct
  misc_feature 1..20: note = chemically synthesized
  source 1..20: mol_type = other DNA
atgtttgaaccctgctgagc

SEQ ID NO: 49377 - DNA, 20 bp, synthetic construct
  misc_feature 1..20: note = chemically synthesized
  source 1..20: mol_type = other DNA
tttgaaccctgctgagccag

SEQ ID NO: 49378 - DNA, 20 bp, synthetic construct
  misc_feature 1..20: note = chemically synthesized
  source 1..20: mol_type = other DNA
accctgctgagccagtggca

SEQ ID NO: 49379 - DNA, 20 bp, synthetic construct
  misc_feature 1..20: note = chemically synthesized
  source 1..20: mol_type = other DNA
ccctgctgagccagtggcat

SEQ ID NO: 49380 - DNA, 20 bp, synthetic construct
  misc_feature 1..20: note = chemically synthesized
  source 1..20: mol_type = other DNA
agccagtggcatgggtctct

SEQ ID NO: 49381 - DNA, 20 bp, synthetic construct
  misc_feature 1..20: note = chemically synthesized
  source 1..20: mol_type = other DNA
ccagtggcatgggtctctga

SEQ ID NO: 49382 - DNA, 20 bp, synthetic construct
  misc_feature 1..20: note = chemically synthesized
  source 1..20: mol_type = other DNA
attaacttaatttgactatc

SEQ ID NO: 49383 - DNA, 20 bp, synthetic construct
  misc_feature 1..20: note = chemically synthesized
  source 1..20: mol_type = other DNA
taatttgactatctggtttg

SEQ ID NO: 49384 - DNA, 20 bp, synthetic construct
  misc_feature 1..20: note = chemically synthesized
  source 1..20: mol_type = other DNA
aatttgactatctggtttgt

SEQ ID NO: 49385 - DNA, 20 bp, synthetic construct
  misc_feature 1..20: note = chemically synthesized
  source 1..20: mol_type = other DNA
gggtgcgtttactctcatgt

SEQ ID NO: 49386 - DNA, 20 bp, synthetic construct
  misc_feature 1..20: note = chemically synthesized
  source 1..20: mol_type = other DNA
catgtaagtcaacaatgtcc

SEQ ID NO: 49387 - DNA, 20 bp, synthetic construct
  misc_feature 1..20: note = chemically synthesized
  source 1..20: mol_type = other DNA
atgtaagtcaacaatgtcct

SEQ ID NO: 49388 - DNA, 20 bp, synthetic construct
  misc_feature 1..20: note = chemically synthesized
  source 1..20: mol_type = other DNA
agtcaacaatgtcctgggat

SEQ ID NO: 49389 - DNA, 20 bp, synthetic construct
  misc_feature 1..20: note = chemically synthesized
  source 1..20: mol_type = other DNA
gtcaacaatgtcctgggatt

SEQ ID NO: 49390 - DNA, 20 bp, synthetic construct
  misc_feature 1..20: note = chemically synthesized
  source 1..20: mol_type = other DNA
tgggattgggacacactttc

SEQ ID NO: 49391 - DNA, 20 bp, synthetic construct
  misc_feature 1..20: note = chemically synthesized
  source 1..20: mol_type = other DNA
gggattgggacacactttct

SEQ ID NO: 49392 - DNA, 20 bp, synthetic construct
  misc_feature 1..20: note = chemically synthesized
  source 1..20: mol_type = other DNA
acacactttctgggcactgc

SEQ ID NO: 49393 - DNA, 20 bp, synthetic construct
  misc_feature 1..20: note = chemically synthesized
  source 1..20: mol_type = other DNA
actttctgggcactgctggc

SEQ ID NO: 49394 - DNA, 20 bp, synthetic construct
  misc_feature 1..20: note = chemically synthesized
  source 1..20: mol_type = other DNA
actgctggccagtcccaaaa

SEQ ID NO: 49395 - DNA, 20 bp, synthetic construct
  misc_feature 1..20: note = chemically synthesized
  source 1..20: mol_type = other DNA
ccagtcccaaaatggaacat

SEQ ID NO: 49396 - DNA, 20 bp, synthetic construct
  misc_feature 1..20: note = chemically synthesized
  source 1..20: mol_type = other DNA
cagtcccaaaatggaacata

SEQ ID NO: 49397 - DNA, 20 bp, synthetic construct
  misc_feature 1..20: note = chemically synthesized
  source 1..20: mol_type = other DNA
tcccaaaatggaacataagg

SEQ ID NO: 49398 - DNA, 20 bp, synthetic construct
  misc_feature 1..20: note = chemically synthesized
  source 1..20: mol_type = other DNA
caaaatggaacataaggaag

SEQ ID NO: 49399 - DNA, 20 bp, synthetic construct
  misc_feature 1..20: note = chemically synthesized
  source 1..20: mol_type = other DNA
acttcttttatttctgaaat

SEQ ID NO: 49400 - DNA, 20 bp, synthetic construct
  misc_feature 1..20: note = chemically synthesized
  source 1..20: mol_type = other DNA
cttcttttatttctgaaatc

SEQ ID NO: 49401 - DNA, 20 bp, synthetic construct
  misc_feature 1..20: note = chemically synthesized
  source 1..20: mol_type = other DNA
ttttatttctgaaatcaggt

SEQ ID NO: 49402 - DNA, 20 bp, synthetic construct
  misc_feature 1..20: note = chemically synthesized
  source 1..20: mol_type = other DNA
ttctgaaatcaggtaagaca

SEQ ID NO: 49403 - DNA, 20 bp, synthetic construct
  misc_feature 1..20: note = chemically synthesized
  source 1..20: mol_type = other DNA
acatagtttttttaaattat

SEQ ID NO: 49404 - DNA, 20 bp, synthetic construct
  misc_feature 1..20: note = chemically synthesized
  source 1..20: mol_type = other DNA
ttattttttctcccacaatg

SEQ ID NO: 49405 - DNA, 20 bp, synthetic construct
  misc_feature 1..20: note = chemically synthesized
  source 1..20: mol_type = other DNA
tagtaaaaatacatatgcca

SEQ ID NO: 49406 - DNA, 20 bp, synthetic construct
  misc_feature 1..20: note = chemically synthesized
  source 1..20: mol_type = other DNA
tttttgattcatgaaattcc

SEQ ID NO: 49407 - DNA, 20 bp, synthetic construct
  misc_feature 1..20: note = chemically synthesized
  source 1..20: mol_type = other DNA
tgaaaaattcttaaaaaaat

SEQ ID NO: 49408 - DNA, 20 bp, synthetic construct
  misc_feature 1..20: note = chemically synthesized
  source 1..20: mol_type = other DNA
ataagtttaatttccccgtg

SEQ ID NO: 49409 - DNA, 20 bp, synthetic construct
  misc_feature 1..20: note = chemically synthesized
  source 1..20: mol_type = other DNA
tttccccgtgaagactgtca

SEQ ID NO: 49410 - DNA, 20 bp, synthetic construct
  misc_feature 1..20: note = chemically synthesized
  source 1..20: mol_type = other DNA
cgtgaagactgtcacggtgc

SEQ ID NO: 49411 - DNA, 20 bp, synthetic construct
  misc_feature 1..20: note = chemically synthesized
  source 1..20: mol_type = other DNA
tgtcacggtgctggaatgaa

SEQ ID NO: 49412 - DNA, 20 bp, synthetic construct
  misc_feature 1..20: note = chemically synthesized
  source 1..20: mol_type = other DNA
gtcacggtgctggaatgaat

SEQ ID NO: 49413 - DNA, 20 bp, synthetic construct
  misc_feature 1..20: note = chemically synthesized
  source 1..20: mol_type = other DNA
acggtgctggaatgaatggg

SEQ ID NO: 49414 - DNA, 20 bp, synthetic construct
  misc_feature 1..20: note = chemically synthesized
  source 1..20: mol_type = other DNA
tgaatgggcagaaaaaataa

SEQ ID NO: 49415 - DNA, 20 bp, synthetic construct
  misc_feature 1..20: note = chemically synthesized
  source 1..20: mol_type = other DNA
ggttgatttttctaatctaa

SEQ ID NO: 49416 - DNA, 20 bp, synthetic construct
  misc_feature 1..20: note = chemically synthesized
  source 1..20: mol_type = other DNA
ttgatttttctaatctaaaa

SEQ ID NO: 49417 - DNA, 20 bp, synthetic construct
  misc_feature 1..20: note = chemically synthesized
  source 1..20: mol_type = other DNA
aaaagagtgtgcctacatga

SEQ ID NO: 49418 - DNA, 20 bp, synthetic construct
  misc_feature 1..20: note = chemically synthesized
  source 1..20: mol_type = other DNA
gagtgtgcctacatgatggc

SEQ ID NO: 49419 - DNA, 20 bp, synthetic construct
  misc_feature 1..20: note = chemically synthesized
  source 1..20: mol_type = other DNA
tgcctacatgatggccagtc

SEQ ID NO: 49420 - DNA, 20 bp, synthetic construct
  misc_feature 1..20: note = chemically synthesized
  source 1..20: mol_type = other DNA
cagtctggctgaaaaataaa

SEQ ID NO: 49421 - DNA, 20 bp, synthetic construct
  misc_feature 1..20: note = chemically synthesized
  source 1..20: mol_type = other DNA
tgaaaaataaatagccattg

SEQ ID NO: 49422 - DNA, 20 bp, synthetic construct
  misc_feature 1..20: note = chemically synthesized
  source 1..20: mol_type = other DNA
ccattgtagctaactatgca

SEQ ID NO: 49423 - DNA, 20 bp, synthetic construct
  misc_feature 1..20: note = chemically synthesized
  source 1..20: mol_type = other DNA
cattgtagctaactatgcaa

SEQ ID NO: 49424 - DNA, 20 bp, synthetic construct
  misc_feature 1..20: note = chemically synthesized
  source 1..20: mol_type = other DNA
gtagctaactatgcaaagga

SEQ ID NO: 49425 - DNA, 20 bp, synthetic construct
  misc_feature 1..20: note = chemically synthesized
  source 1..20: mol_type = other DNA
taactatgcaaaggatggct

SEQ ID NO: 49426 - DNA, 20 bp, synthetic construct
  misc_feature 1..20: note = chemically synthesized
  source 1..20: mol_type = other DNA
ggatggctaagctcttcgct

SEQ ID NO: 49427 - DNA, 20 bp, synthetic construct
  misc_feature 1..20: note = chemically synthesized
  source 1..20: mol_type = other DNA
taagctcttcgcttggttct

SEQ ID NO: 49428 - DNA, 20 bp, synthetic construct
  misc_feature 1..20: note = chemically synthesized
  source 1..20: mol_type = other DNA
taatttatatcatctctgtt

SEQ ID NO: 49429 - DNA, 20 bp, synthetic construct
  misc_feature 1..20: note = chemically synthesized
  source 1..20: mol_type = other DNA
aatttatatcatctctgttc

SEQ ID NO: 49430 - DNA, 20 bp, synthetic construct
  misc_feature 1..20: note = chemically synthesized
  source 1..20: mol_type = other DNA
aggtgccatgctcccctcac

SEQ ID NO: 49431 - DNA, 20 bp, synthetic construct
  misc_feature 1..20: note = chemically synthesized
  source 1..20: mol_type = other DNA
gccatgctcccctcactagc

SEQ ID NO: 49432 - DNA, 20 bp, synthetic construct
  misc_feature 1..20: note = chemically synthesized
  source 1..20: mol_type = other DNA
aataactctttgaatatgtt

SEQ ID NO: 49433 - DNA, 20 bp, synthetic construct
  misc_feature 1..20: note = chemically synthesized
  source 1..20: mol_type = other DNA
ttggttccttgacctgttca

SEQ ID NO: 49434 - DNA, 20 bp, synthetic construct
  misc_feature 1..20: note = chemically synthesized
  source 1..20: mol_type = other DNA
ggttccttgacctgttcatg

SEQ ID NO: 49435 - DNA, 20 bp, synthetic construct
  misc_feature 1..20: note = chemically synthesized
  source 1..20: mol_type = other DNA
tccttgacctgttcatggag

SEQ ID NO: 49436 - DNA, 20 bp, synthetic construct
  misc_feature 1..20: note = chemically synthesized
  source 1..20: mol_type = other DNA
ccttgacctgttcatggagt

SEQ ID NO: 49437 - DNA, 20 bp, synthetic construct
  misc_feature 1..20: note = chemically synthesized
  source 1..20: mol_type = other DNA
cctgttcatggagtgggact

SEQ ID NO: 49438 - DNA, 20 bp, synthetic construct
  misc_feature 1..20: note = chemically synthesized
  source 1..20: mol_type = other DNA
cagcatttctctctttgtta

SEQ ID NO: 49439 - DNA, 20 bp, synthetic construct
  misc_feature 1..20: note = chemically synthesized
  source 1..20: mol_type = other DNA
ttctctctttgttatggcct

SEQ ID NO: 49440 - DNA, 20 bp, synthetic construct
  misc_feature 1..20: note = chemically synthesized
  source 1..20: mol_type = other DNA
ctctttgttatggcctgagt

SEQ ID NO: 49441 - DNA, 20 bp, synthetic construct
  misc_feature 1..20: note = chemically synthesized
  source 1..20: mol_type = other DNA
tctttgttatggcctgagta

SEQ ID NO: 49442 - DNA, 20 bp, synthetic construct
  misc_feature 1..20: note = chemically synthesized
  source 1..20: mol_type = other DNA
gcctgagtaaggctttccat

SEQ ID NO: 49443 - DNA, 20 bp, synthetic construct
  misc_feature 1..20: note = chemically synthesized
  source 1..20: mol_type = other DNA
atacatttgcttcttatccc

SEQ ID NO: 49444 - DNA, 20 bp, synthetic construct
  misc_feature 1..20: note = chemically synthesized
  source 1..20: mol_type = other DNA
acatttgcttcttatccctg

SEQ ID NO: 49445 - DNA, 20 bp, synthetic construct
  misc_feature 1..20: note = chemically synthesized
  source 1..20: mol_type = other DNA
aattatacacatccatttgc

SEQ ID NO: 49446 - DNA, 20 bp, synthetic construct
  misc_feature 1..20: note = chemically synthesized
  source 1..20: mol_type = other DNA
ataatgattcaacaaatact

SEQ ID NO: 49447 - DNA, 20 bp, synthetic construct
  misc_feature 1..20: note = chemically synthesized
  source 1..20: mol_type = other DNA
taatgattcaacaaatactc

SEQ ID NO: 49448 - DNA, 20 bp, synthetic construct
  misc_feature 1..20: note = chemically synthesized
  source 1..20: mol_type = other DNA
aatgattcaacaaatactca

SEQ ID NO: 49449 - DNA, 20 bp, synthetic construct
  misc_feature 1..20: note = chemically synthesized
  source 1..20: mol_type = other DNA
aaatactcagggtatttgtt

SEQ ID NO: 49450 - DNA, 20 bp, synthetic construct
  misc_feature 1..20: note = chemically synthesized
  source 1..20: mol_type = other DNA
tactcagggtatttgttgag

SEQ ID NO: 49451 - DNA, 20 bp, synthetic construct
  misc_feature 1..20: note = chemically synthesized
  source 1..20: mol_type = other DNA
actcagggtatttgttgagt

SEQ ID NO: 49452 - DNA, 20 bp, synthetic construct
  misc_feature 1..20: note = chemically synthesized
  source 1..20: mol_type = other DNA
agggtatttgttgagtgggt

SEQ ID NO: 49453 - DNA, 20 bp, synthetic construct
  misc_feature 1..20: note = chemically synthesized
  source 1..20: mol_type = other DNA
gggtatttgttgagtgggtt

SEQ ID NO: 49454 - DNA, 20 bp, synthetic construct
  misc_feature 1..20: note = chemically synthesized
  source 1..20: mol_type = other DNA
ccgtgtgtgattgtgaatgt

SEQ ID NO: 49455 - DNA, 20 bp, synthetic construct
  misc_feature 1..20: note = chemically synthesized
  source 1..20: mol_type = other DNA
tgtgtgtcctttacaaatac

SEQ ID NO: 49456 - DNA, 20 bp, synthetic construct
  misc_feature 1..20: note = chemically synthesized
  source 1..20: mol_type = other DNA
tttacaaatactagcttatt

SEQ ID NO: 49457 - DNA, 20 bp, synthetic construct
  misc_feature 1..20: note = chemically synthesized
  source 1..20: mol_type = other DNA
atactagcttatttagctca

SEQ ID NO: 49458 - DNA, 20 bp, synthetic construct
  misc_feature 1..20: note = chemically synthesized
  source 1..20: mol_type = other DNA
agcttatttagctcatggta

SEQ ID NO: 49459 - DNA, 20 bp, synthetic construct
  misc_feature 1..20: note = chemically synthesized
  source 1..20: mol_type = other DNA
gcttatttagctcatggtat

SEQ ID NO: 49460 - DNA, 20 bp, synthetic construct
  misc_feature 1..20: note = chemically synthesized
  source 1..20: mol_type = other DNA
tatttagctcatggtatagg

SEQ ID NO: 49461 - DNA, 20 bp, synthetic construct
  misc_feature 1..20: note = chemically synthesized
  source 1..20: mol_type = other DNA
atttagctcatggtataggt

SEQ ID NO: 49462 - DNA, 20 bp, synthetic construct
  misc_feature 1..20: note = chemically synthesized
  source 1..20: mol_type = other DNA
tttagctcatggtataggta

SEQ ID NO: 49463 - DNA, 20 bp, synthetic construct
  misc_feature 1..20: note = chemically synthesized
  source 1..20: mol_type = other DNA
agctcatggtataggtaggg

SEQ ID NO: 49464 - DNA, 20 bp, synthetic construct
  misc_feature 1..20: note = chemically synthesized
  source 1..20: mol_type = other DNA
atggtataggtagggtagca

SEQ ID NO: 49465 - DNA, 20 bp, synthetic construct
  misc_feature 1..20: note = chemically synthesized
  source 1..20: mol_type = other DNA
tcatccccattttataaaca

SEQ ID NO: 49466 - DNA, 20 bp, synthetic construct
  misc_feature 1..20: note = chemically synthesized
  source 1..20: mol_type = other DNA
attttataaacaaagaaatc

SEQ ID NO: 49467 - DNA, 20 bp, synthetic construct
  misc_feature 1..20: note = chemically synthesized
  source 1..20: mol_type = other DNA
taaacaaagaaatctagact

SEQ ID NO: 49468 - DNA, 20 bp, synthetic construct
  misc_feature 1..20: note = chemically synthesized
  source 1..20: mol_type = other DNA
aaacaaagaaatctagactt

SEQ ID NO: 49469 - DNA, 20 bp, synthetic construct
  misc_feature 1..20: note = chemically synthesized
  source 1..20: mol_type = other DNA
cgtgaccaaattcccaaatc

SEQ ID NO: 49470 - DNA, 20 bp, synthetic construct
  misc_feature 1..20: note = chemically synthesized
  source 1..20: mol_type = other DNA
gtgaccaaattcccaaatca

SEQ ID NO: 49471 - DNA, 20 bp, synthetic construct
  misc_feature 1..20: note = chemically synthesized
  source 1..20: mol_type = other DNA
attcccaaatcaaggaaata

SEQ ID NO: 49472 - DNA, 20 bp, synthetic construct
  misc_feature 1..20: note = chemically synthesized
  source 1..20: mol_type = other DNA
atcaaggaaataaagaaacc

SEQ ID NO: 49473 - DNA, 20 bp, synthetic construct
  misc_feature 1..20: note = chemically synthesized
  source 1..20: mol_type = other DNA
aaataaagaaacctggattt

SEQ ID NO: 49474 - DNA, 20 bp, synthetic construct
  misc_feature 1..20: note = chemically synthesized
  source 1..20: mol_type = other DNA
aaagaaacctggatttaagc

SEQ ID NO: 49475 - DNA, 20 bp, synthetic construct
  misc_feature 1..20: note = chemically synthesized
  source 1..20: mol_type = other DNA
tggatttaagccagatttcc

SEQ ID NO: 49476 - DNA, 20 bp, synthetic construct
  misc_feature 1..20: note = chemically synthesized
  source 1..20: mol_type = other DNA
cagatttccaagaaaaaatc

SEQ ID NO: 49477 - DNA, 20 bp, synthetic construct
  misc_feature 1..20: note = chemically synthesized
  source 1..20: mol_type = other DNA
agatttccaagaaaaaatct

SEQ ID NO: 49478 - DNA, 20 bp, synthetic construct
  misc_feature 1..20: note = chemically synthesized
  source 1..20: mol_type = other DNA
gatttccaagaaaaaatcta

SEQ ID NO: 49479 - DNA, 20 bp, synthetic construct
  misc_feature 1..20: note = chemically synthesized
  source 1..20: mol_type = other DNA
aacacattccaatgtaactg

SEQ ID NO: 49480 - DNA, 20 bp, synthetic construct
  misc_feature 1..20: note = chemically synthesized
  source 1..20: mol_type = other DNA
cacattccaatgtaactgaa

SEQ ID NO: 49481 - DNA, 20 bp, synthetic construct
  misc_feature 1..20: note = chemically synthesized
  source 1..20: mol_type = other DNA
attccaatgtaactgaagag

SEQ ID NO: 49482 - DNA, 20 bp, synthetic construct
  misc_feature 1..20: note = chemically synthesized
  source 1..20: mol_type = other DNA
ttccaatgtaactgaagagc

SEQ ID NO: 49483 - DNA, 20 bp, synthetic construct
  misc_feature 1..20: note = chemically synthesized
  source 1..20: mol_type = other DNA
ggttaattgtttgccacttg

SEQ ID NO: 49484 - DNA, 20 bp, synthetic construct
  misc_feature 1..20: note = chemically synthesized
  source 1..20: mol_type = other DNA
gccacttgcagaatccaatt

SEQ ID NO: 49485 - DNA, 20 bp, synthetic construct
  misc_feature 1..20: note = chemically synthesized
  source 1..20: mol_type = other DNA
acttgcagaatccaattaag

SEQ ID NO: 49486 - DNA, 20 bp, synthetic construct
  misc_feature 1..20: note = chemically synthesized
  source 1..20: mol_type = other DNA
ttgcagaatccaattaagaa

SEQ ID NO: 49487 - DNA, 20 bp, synthetic construct
  misc_feature 1..20: note = chemically synthesized
  source 1..20: mol_type = other DNA
gcagaatccaattaagaaga

SEQ ID NO: 49488 - DNA, 20 bp, synthetic construct
  misc_feature 1..20: note = chemically synthesized
  source 1..20: mol_type = other DNA
gaatccaattaagaagagag

SEQ ID NO: 49489 - DNA, 20 bp, synthetic construct
  misc_feature 1..20: note = chemically synthesized
  source 1..20: mol_type = other DNA
caattaagaagagagaagtc

SEQ ID NO: 49490 - DNA, 20 bp, synthetic construct
  misc_feature 1..20: note = chemically synthesized
  source 1..20: mol_type = other DNA
gaagagagaagtctggtata

SEQ ID NO: 49491 - DNA, 20 bp, synthetic construct
  misc_feature 1..20: note = chemically synthesized
  source 1..20: mol_type = other DNA
agagaagtctggtataaaga

SEQ ID NO: 49492 - DNA, 20 bp, synthetic construct
  misc_feature 1..20: note = chemically synthesized
  source 1..20: mol_type = other DNA
aagaaagtgatttgcttcca

SEQ ID NO: 49493 - DNA, 20 bp, synthetic construct
  misc_feature 1..20: note = chemically synthesized
  source 1..20: mol_type = other DNA
aagtgatttgcttccaaagc

SEQ ID NO: 49494 - DNA, 20 bp, synthetic construct
  misc_feature 1..20: note = chemically synthesized
  source 1..20: mol_type = other DNA
atttgcttccaaagctagct

SEQ ID NO: 49495 - DNA, 20 bp, synthetic construct
  misc_feature 1..20: note = chemically synthesized
  source 1..20: mol_type = other DNA
tttgcttccaaagctagctt

SEQ ID NO: 49496 - DNA, 20 bp, synthetic construct
  misc_feature 1..20: note = chemically synthesized
  source 1..20: mol_type = other DNA
ttgcttccaaagctagctta

SEQ ID NO: 49497 - DNA, 20 bp, synthetic construct
  misc_feature 1..20: note = chemically synthesized
  source 1..20: mol_type = other DNA
tgcttccaaagctagcttag

SEQ ID NO: 49498 - DNA, 20 bp, synthetic construct
  misc_feature 1..20: note = chemically synthesized
  source 1..20: mol_type = other DNA
ttccaaagctagcttagggg

SEQ ID NO: 49499 - DNA, 20 bp, synthetic construct
  misc_feature 1..20: note = chemically synthesized
  source 1..20: mol_type = other DNA
ctagcttaggggaagaaatg

SEQ ID NO: 49500 - DNA, 20 bp, synthetic construct
  misc_feature 1..20: note = chemically synthesized
  source 1..20: mol_type = other DNA
gcttaggggaagaaatgcag

SEQ ID NO: 49501 - DNA, 20 bp, synthetic construct
  misc_feature 1..20: note = chemically synthesized
  source 1..20: mol_type = other DNA
cctgccgtactacttcactt

SEQ ID NO: 49502 - DNA, 20 bp, synthetic construct
  misc_feature 1..20: note = chemically synthesized
  source 1..20: mol_type = other DNA
ctgccgtactacttcacttt

SEQ ID NO: 49503 - DNA, 20 bp, synthetic construct
  misc_feature 1..20: note = chemically synthesized
  source 1..20: mol_type = other DNA
gccgtactacttcactttag

SEQ ID NO: 49504 - DNA, 20 bp, synthetic construct
  misc_feature 1..20: note = chemically synthesized
  source 1..20: mol_type = other DNA
gtactacttcactttaggag

SEQ ID NO: 49505 - DNA, 20 bp, synthetic construct
  misc_feature 1..20: note = chemically synthesized
  source 1..20: mol_type = other DNA
tacttcactttaggagcaga

SEQ ID NO: 49506 - DNA, 20 bp, synthetic construct
  misc_feature 1..20: note = chemically synthesized
  source 1..20: mol_type = other DNA
ttcactttaggagcagaaag

SEQ ID NO: 49507 - DNA, 20 bp, synthetic construct
  misc_feature 1..20: note = chemically synthesized
  source 1..20: mol_type = other DNA
gcagaaagtggcacttttaa

SEQ ID NO: 49508 - DNA, 20 bp, synthetic construct
  misc_feature 1..20: note = chemically synthesized
  source 1..20: mol_type = other DNA
cagaaagtggcacttttaaa

SEQ ID NO: 49509 - DNA, 20 bp, synthetic construct
  misc_feature 1..20: note = chemically synthesized
  source 1..20: mol_type = other DNA
gtggcacttttaaaaggcaa

SEQ ID NO: 49510 - DNA, 20 bp, synthetic construct
  misc_feature 1..20: note = chemically synthesized
  source 1..20: mol_type = other DNA
ggcacttttaaaaggcaaca

SEQ ID NO: 49511 - DNA, 20 bp, synthetic construct
  misc_feature 1..20: note = chemically synthesized
  source 1..20: mol_type = other DNA
gcacttttaaaaggcaacag

SEQ ID NO: 49512 - DNA, 20 bp, synthetic construct
  misc_feature 1..20: note = chemically synthesized
  source 1..20: mol_type = other DNA
acttttaaaaggcaacagag

SEQ ID NO: 49513 - DNA, 20 bp, synthetic construct
  misc_feature 1..20: note = chemically synthesized
  source 1..20: mol_type = other DNA
cttttaaaaggcaacagagg

SEQ ID NO: 49514 - DNA, 20 bp, synthetic construct
  misc_feature 1..20: note = chemically synthesized
  source 1..20: mol_type = other DNA
taaaaggcaacagaggaggc

SEQ ID NO: 49515 - DNA, 20 bp, synthetic construct
  misc_feature 1..20: note = chemically synthesized
  source 1..20: mol_type = other DNA
aggcaacagaggaggcgagc

SEQ ID NO: 49516 - DNA, 20 bp, synthetic construct
  misc_feature 1..20: note = chemically synthesized
  source 1..20: mol_type = other DNA
ggcaacagaggaggcgagca

SEQ ID NO: 49517 - DNA, 20 bp, synthetic construct
  misc_feature 1..20: note = chemically synthesized
  source 1..20: mol_type = other DNA
agaggaggcgagcaaggatt

SEQ ID NO: 49518 - DNA, 20 bp, synthetic construct
  misc_feature 1..20: note = chemically synthesized
  source 1..20: mol_type = other DNA
gaggaggcgagcaaggattc

SEQ ID NO: 49519 - DNA, 20 bp, synthetic construct
  misc_feature 1..20: note = chemically synthesized
  source 1..20: mol_type = other DNA
aggaggcgagcaaggattca

SEQ ID NO: 49520 - DNA, 20 bp, synthetic construct
  misc_feature 1..20: note = chemically synthesized
  source 1..20: mol_type = other DNA
ggaggcgagcaaggattcag

SEQ ID NO: 49521 - DNA, 20 bp, synthetic construct
  misc_feature 1..20: note = chemically synthesized
  source 1..20: mol_type = other DNA
aaggattcaggggtccatgc

SEQ ID NO: 49522 - DNA, 20 bp, synthetic construct
  misc_feature 1..20: note = chemically synthesized
  source 1..20: mol_type = other DNA
ttcaggggtccatgctagct

SEQ ID NO: 49523 - DNA, 20 bp, synthetic construct
  misc_feature 1..20: note = chemically synthesized
  source 1..20: mol_type = other DNA
tcaggggtccatgctagctt

SEQ ID NO: 49524 - DNA, 20 bp, synthetic construct
  misc_feature 1..20: note = chemically synthesized
  source 1..20: mol_type = other DNA
agcttgggcaccttatccac

SEQ ID NO: 49525 - DNA, 20 bp, synthetic construct
  misc_feature 1..20: note = chemically synthesized
  source 1..20: mol_type = other DNA
gcttgggcaccttatccacc

SEQ ID NO: 49526 - DNA, 20 bp, synthetic construct
  misc_feature 1..20: note = chemically synthesized
  source 1..20: mol_type = other DNA
tgggcaccttatccaccagg

SEQ ID NO: 49527 - DNA, 20 bp, synthetic construct
  misc_feature 1..20: note = chemically synthesized
  source 1..20: mol_type = other DNA
accttatccaccaggtagtt

SEQ ID NO: 49528 - DNA, 20 bp, synthetic construct
  misc_feature 1..20: note = chemically synthesized
  source 1..20: mol_type = other DNA
ttatccaccaggtagttgag

SEQ ID NO: 49529 - DNA, 20 bp, synthetic construct
  misc_feature 1..20: note = chemically synthesized
  source 1..20: mol_type = other DNA
gtagttgagcagttgcctgc

SEQ ID NO: 49530 - DNA, 20 bp, synthetic construct
  misc_feature 1..20: note = chemically synthesized
  source 1..20: mol_type = other DNA
ttgcctgctggtgcctttgt

SEQ ID NO: 49531 - DNA, 20 bp, synthetic construct
  misc_feature 1..20: note = chemically synthesized
  source 1..20: mol_type = other DNA
cctgctggtgcctttgtgag

SEQ ID NO: 49532 - DNA, 20 bp, synthetic construct
  misc_feature 1..20: note = chemically synthesized
  source 1..20: mol_type = other DNA
ctgctggtgcctttgtgagc

SEQ ID NO: 49533 - DNA, 20 bp, synthetic construct
  misc_feature 1..20: note = chemically synthesized
  source 1..20: mol_type = other DNA
tgctggtgcctttgtgagca

SEQ ID NO: 49534 - DNA, 20 bp, synthetic construct
  misc_feature 1..20: note = chemically synthesized
  source 1..20: mol_type = other DNA
tgagcagggtgttgtccctt

SEQ ID NO: 49535 - DNA, 20 bp, synthetic construct
  misc_feature 1..20: note = chemically synthesized
  source 1..20: mol_type = other DNA
gagcagggtgttgtcccttg

SEQ ID NO: 49536 - DNA, 20 bp, synthetic construct
  misc_feature 1..20: note = chemically synthesized
  source 1..20: mol_type = other DNA
tgtcccttgaggcaaatctc

SEQ ID NO: 49537 - DNA, 20 bp, synthetic construct
  misc_feature 1..20: note = chemically synthesized
  source 1..20: mol_type = other DNA
tcccttgaggcaaatctctg

SEQ ID NO: 49538 - DNA, 20 bp, synthetic construct
  misc_feature 1..20: note = chemically synthesized
  source 1..20: mol_type = other DNA
cccttgaggcaaatctctgg

SEQ ID NO: 49539 - DNA, 20 bp, synthetic construct
  misc_feature 1..20: note = chemically synthesized
  source 1..20: mol_type = other DNA
ccttgaggcaaatctctgga

SEQ ID NO: 49540 - DNA, 20 bp, synthetic construct
  misc_feature 1..20: note = chemically synthesized
  source 1..20: mol_type = other DNA
gaggcaaatctctggagggt

SEQ ID NO: 49541 - DNA, 20 bp, synthetic construct
  misc_feature 1..20: note = chemically synthesized
  source 1..20: mol_type = other DNA
ggcaaatctctggagggtga

SEQ ID NO: 49542 - DNA, 20 bp, synthetic construct
  misc_feature 1..20: note = chemically synthesized
  source 1..20: mol_type = other DNA
tctggagggtgagagttttg

SEQ ID NO: 49543 - DNA, 20 bp, synthetic construct
  misc_feature 1..20: note = chemically synthesized
  source 1..20: mol_type = other DNA
ggagggtgagagttttgtag

SEQ ID NO: 49544 - DNA, 20 bp, synthetic construct
  misc_feature 1..20: note = chemically synthesized
  source 1..20: mol_type = other DNA
gagggtgagagttttgtagt

SEQ ID NO: 49545 - DNA, 20 bp, synthetic construct
  misc_feature 1..20: note = chemically synthesized
  source 1..20: mol_type = other DNA
gttttgtagtgggcatgctt

SEQ ID NO: 49546 - DNA, 20 bp, synthetic construct
  misc_feature 1..20: note = chemically synthesized
  source 1..20: mol_type = other DNA
ttataaatcacctgtgaact

SEQ ID NO: 49547 - DNA, 20 bp, synthetic construct
  misc_feature 1..20: note = chemically synthesized
  source 1..20: mol_type = other DNA
tataaatcacctgtgaactc

SEQ ID NO: 49548 - DNA, 20 bp, synthetic construct
  misc_feature 1..20: note = chemically synthesized
  source 1..20: mol_type = other DNA
taaatcacctgtgaactcag

SEQ ID NO: 49549 - DNA, 20 bp, synthetic construct
  misc_feature 1..20: note = chemically synthesized
  source 1..20: mol_type = other DNA
aactcaggagttccatcttg

SEQ ID NO: 49550 - DNA, 20 bp, synthetic construct
  misc_feature 1..20: note = chemically synthesized
  source 1..20: mol_type = other DNA
tccatcttgaagcacataca

SEQ ID NO: 49551 - DNA, 20 bp, synthetic construct
  misc_feature 1..20: note = chemically synthesized
  source 1..20: mol_type = other DNA
tcttgaagcacatacatagt

SEQ ID NO: 49552 - DNA, 20 bp, synthetic construct
  misc_feature 1..20: note = chemically synthesized
  source 1..20: mol_type = other DNA
agttagatgaacttgccctg

SEQ ID NO: 49553 - DNA, 20 bp, synthetic construct
  misc_feature 1..20: note = chemically synthesized
  source 1..20: mol_type = other DNA
gttagatgaacttgccctgc

SEQ ID NO: 49554 - DNA, 20 bp, synthetic construct
  misc_feature 1..20: note = chemically synthesized
  source 1..20: mol_type = other DNA
ttagatgaacttgccctgca

SEQ ID NO: 49555 - DNA, 20 bp, synthetic construct
  misc_feature 1..20: note = chemically synthesized
  source 1..20: mol_type = other DNA
agatgaacttgccctgcagg

SEQ ID NO: 49556 - DNA, 20 bp, synthetic construct
  misc_feature 1..20: note = chemically synthesized
  source 1..20: mol_type = other DNA
atgaacttgccctgcaggga

SEQ ID NO: 49557 - DNA, 20 bp, synthetic construct
  misc_feature 1..20: note = chemically synthesized
  source 1..20: mol_type = other DNA
ctgcagggagagtctgatga

SEQ ID NO: 49558 - DNA, 20 bp, synthetic construct
  misc_feature 1..20: note = chemically synthesized
  source 1..20: mol_type = other DNA
tgcagggagagtctgatgaa

SEQ ID NO: 49559 - DNA, 20 bp, synthetic construct
  misc_feature 1..20: note = chemically synthesized
  source 1..20: mol_type = other DNA
gcagggagagtctgatgaaa

SEQ ID NO: 49560 - DNA, 20 bp, synthetic construct
  misc_feature 1..20: note = chemically synthesized
  source 1..20: mol_type = other DNA
agggagagtctgatgaaagg

SEQ ID NO: 49561 - DNA, 20 bp, synthetic construct
  misc_feature 1..20: note = chemically synthesized
  source 1..20: mol_type = other DNA
gggagagtctgatgaaaggg

SEQ ID NO: 49562 - DNA, 20 bp, synthetic construct
  misc_feature 1..20: note = chemically synthesized
  source 1..20: mol_type = other DNA
agagtctgatgaaagggagg

SEQ ID NO: 49563 - DNA, 20 bp, synthetic construct
  misc_feature 1..20: note = chemically synthesized
  source 1..20: mol_type = other DNA
caatttaatctataaattac

SEQ ID NO: 49564 - DNA, 20 bp, synthetic construct
  misc_feature 1..20: note = chemically synthesized
  source 1..20: mol_type = other DNA
attaccagataaaattttac

SEQ ID NO: 49565 - DNA, 20 bp, synthetic construct
  misc_feature 1..20: note = chemically synthesized
  source 1..20: mol_type = other DNA
aattttacaagttgacttta

SEQ ID NO: 49566 - DNA, 20 bp, synthetic construct
  misc_feature 1..20: note = chemically synthesized
  source 1..20: mol_type = other DNA
aagtcaaacacatttgaatt

SEQ ID NO: 49567 - DNA, 20 bp, synthetic construct
  misc_feature 1..20: note = chemically synthesized
  source 1..20: mol_type = other DNA
tcaaacacatttgaatttag

SEQ ID NO: 49568 - DNA, 20 bp, synthetic construct
  misc_feature 1..20: note = chemically synthesized
  source 1..20: mol_type = other DNA
aacacatttgaatttagtgg

SEQ ID NO: 49569 - DNA, 20 bp, synthetic construct
  misc_feature 1..20: note = chemically synthesized
  source 1..20: mol_type = other DNA
gaatttagtggaagccattc

SEQ ID NO: 49570 - DNA, 20 bp, synthetic construct
  misc_feature 1..20: note = chemically synthesized
  source 1..20: mol_type = other DNA
agccattcaagaaaatatca

SEQ ID NO: 49571 - DNA, 20 bp, synthetic construct
  misc_feature 1..20: note = chemically synthesized
  source 1..20: mol_type = other DNA
agaaaatatcaaagaaaata

SEQ ID NO: 49572 - DNA, 20 bp, synthetic construct
  misc_feature 1..20: note = chemically synthesized
  source 1..20: mol_type = other DNA
aaaatatcaaagaaaataca

SEQ ID NO: 49573 - DNA, 20 bp, synthetic construct
  misc_feature 1..20: note = chemically synthesized
  source 1..20: mol_type = other DNA
atatcaaagaaaatacagag

SEQ ID NO: 49574 - DNA, 20 bp, synthetic construct
  misc_feature 1..20: note = chemically synthesized
  source 1..20: mol_type = other DNA
tatcaaagaaaatacagagc

SEQ ID NO: 49575 - DNA, 20 bp, synthetic construct
  misc_feature 1..20: note = chemically synthesized
  source 1..20: mol_type = other DNA
tcaaagaaaatacagagcag

SEQ ID NO: 49576 - DNA, 20 bp, synthetic construct
  misc_feature 1..20: note = chemically synthesized
  source 1..20: mol_type = other DNA
aagaaaatacagagcaggag

SEQ ID NO: 49577 - DNA, 20 bp, synthetic construct
  misc_feature 1..20: note = chemically synthesized
  source 1..20: mol_type = other DNA
atacagagcaggagaagatt

SEQ ID NO: 49578 - DNA, 20 bp, synthetic construct
  misc_feature 1..20: note = chemically synthesized
  source 1..20: mol_type = other DNA
gagcaggagaagattaagca

SEQ ID NO: 49579 - DNA, 20 bp, synthetic construct
  misc_feature 1..20: note = chemically synthesized
  source 1..20: mol_type = other DNA
gcaggagaagattaagcaaa

SEQ ID NO: 49580 - DNA, 20 bp, synthetic construct
  misc_feature 1..20: note = chemically synthesized
  source 1..20: mol_type = other DNA
agattaagcaaagagttttt

SEQ ID NO: 49581 - DNA, 20 bp, synthetic construct
  misc_feature 1..20: note = chemically synthesized
  source 1..20: mol_type = other DNA
gattaagcaaagagtttttt

SEQ ID NO: 49582 - DNA, 20 bp, synthetic construct
  misc_feature 1..20: note = chemically synthesized
  source 1..20: mol_type = other DNA
attaagcaaagagttttttg

SEQ ID NO: 49583 - DNA, 20 bp, synthetic construct
  misc_feature 1..20: note = chemically synthesized
  source 1..20: mol_type = other DNA
aaagagttttttggggaaat

SEQ ID NO: 49584 - DNA, 20 bp, synthetic construct
  misc_feature 1..20: note = chemically synthesized
  source 1..20: mol_type = other DNA
ggtgtctatgtctgtgtgtg

SEQ ID NO: 49585 - DNA, 20 bp, synthetic construct
  misc_feature 1..20: note = chemically synthesized
  source 1..20: mol_type = other DNA
gtgtctatgtctgtgtgtgt

SEQ ID NO: 49586 - DNA, 20 bp, synthetic construct
  misc_feature 1..20: note = chemically synthesized
  source 1..20: mol_type = other DNA
tgtctatgtctgtgtgtgta

SEQ ID NO: 49587 - DNA, 20 bp, synthetic construct
  misc_feature 1..20: note = chemically synthesized
  source 1..20: mol_type = other DNA
tctatgtctgtgtgtgtagg

SEQ ID NO: 49588 - DNA, 20 bp, synthetic construct
  misc_feature 1..20: note = chemically synthesized
  source 1..20: mol_type = other DNA
gtctgtgtgtgtagggagtg

SEQ ID NO: 49589 - DNA, 20 bp, synthetic construct
  misc_feature 1..20: note = chemically synthesized
  source 1..20: mol_type = other DNA
tctgtgtgtgtagggagtgc

SEQ ID NO: 49590 - DNA, 20 bp, synthetic construct
  misc_feature 1..20: note = chemically synthesized
  source 1..20: mol_type = other DNA
ctgtgtgtgtagggagtgca

SEQ ID NO: 49591 - DNA, 20 bp, synthetic construct
  misc_feature 1..20: note = chemically synthesized
  source 1..20: mol_type = other DNA
tgtgtgtgtagggagtgcag

SEQ ID NO: 49592 - DNA, 20 bp, synthetic construct
  misc_feature 1..20: note = chemically synthesized
  source 1..20: mol_type = other DNA
gggatatgaatattctattt

SEQ ID NO: 49593 - DNA, 20 bp, synthetic construct
  misc_feature 1..20: note = chemically synthesized
  source 1..20: mol_type = other DNA
gaatattctatttcagccca

SEQ ID NO: 49594 - DNA, 20 bp, synthetic construct
  misc_feature 1..20: note = chemically synthesized
  source 1..20: mol_type = other DNA
ctatttcagcccatggaaac

SEQ ID NO: 49595 - DNA, 20 bp, synthetic construct
  misc_feature 1..20: note = chemically synthesized
  source 1..20: mol_type = other DNA
tatttcagcccatggaaact

SEQ ID NO: 49596 - DNA, 20 bp, synthetic construct
  misc_feature 1..20: note = chemically synthesized
  source 1..20: mol_type = other DNA
agcccatggaaactaggatg

SEQ ID NO: 49597 - DNA, 20 bp, synthetic construct
  misc_feature 1..20: note = chemically synthesized
  source 1..20: mol_type = other DNA
tagatcactgtgaacttatt

SEQ ID NO: 49598 - DNA, 20 bp, synthetic construct
  misc_feature 1..20: note = chemically synthesized
  source 1..20: mol_type = other DNA
atcactgtgaacttattcag

SEQ ID NO: 49599 - DNA, 20 bp, synthetic construct
  misc_feature 1..20: note = chemically synthesized
  source 1..20: mol_type = other DNA
tcactgtgaacttattcagc

SEQ ID NO: 49600 - DNA, 20 bp, synthetic construct
  misc_feature 1..20: note = chemically synthesized
  source 1..20: mol_type = other DNA
tattcagcaggctacaccca

SEQ ID NO: 49601 - DNA, 20 bp, synthetic construct
  misc_feature 1..20: note = chemically synthesized
  source 1..20: mol_type = other DNA
attcagcaggctacacccaa

SEQ ID NO: 49602 - DNA, 20 bp, synthetic construct
  misc_feature 1..20: note = chemically synthesized
  source 1..20: mol_type = other DNA
agcaggctacacccaaaggc

SEQ ID NO: 49603 - DNA, 20 bp, synthetic construct
  misc_feature 1..20: note = chemically synthesized
  source 1..20: mol_type = other DNA
tagaacaaacttctctgcca

SEQ ID NO: 49604 - DNA, 20 bp, synthetic construct
  misc_feature 1..20: note = chemically synthesized
  source 1..20: mol_type = other DNA
agaacaaacttctctgccac

SEQ ID NO: 49605 - DNA, 20 bp, synthetic construct
  misc_feature 1..20: note = chemically synthesized
  source 1..20: mol_type = other DNA
aacatatgttttaatcgacc

SEQ ID NO: 49606 - DNA, 20 bp, synthetic construct
  misc_feature 1..20: note = chemically synthesized
  source 1..20: mol_type = other DNA
acatatgttttaatcgacct

SEQ ID NO: 49607 - DNA, 20 bp, synthetic construct
  misc_feature 1..20: note = chemically synthesized
  source 1..20: mol_type = other DNA
catatgttttaatcgacctg

SEQ ID NO: 49608 - DNA, 20 bp, synthetic construct
  misc_feature 1..20: note = chemically synthesized
  source 1..20: mol_type = other DNA
atatgttttaatcgacctgg

SEQ ID NO: 49609 - DNA, 20 bp, synthetic construct
  misc_feature 1..20: note = chemically synthesized
  source 1..20: mol_type = other DNA
tatgttttaatcgacctggg

SEQ ID NO: 49610 - DNA, 20 bp, synthetic construct
  misc_feature 1..20: note = chemically synthesized
  source 1..20: mol_type = other DNA
tggggggcacattctctgat

SEQ ID NO: 49611 - DNA, 20 bp, synthetic construct
  misc_feature 1..20: note = chemically synthesized
  source 1..20: mol_type = other DNA
cattctctgataagctcttt

SEQ ID NO: 49612 - DNA, 20 bp, synthetic construct
  misc_feature 1..20: note = chemically synthesized
  source 1..20: mol_type = other DNA
ctctgataagctcttttgga

SEQ ID NO: 49613 - DNA, 20 bp, synthetic construct
  misc_feature 1..20: note = chemically synthesized
  source 1..20: mol_type = other DNA
gataagctcttttggaaagc

SEQ ID NO: 49614 - DNA, 20 bp, synthetic construct
  misc_feature 1..20: note = chemically synthesized
  source 1..20: mol_type = other DNA
ataagctcttttggaaagcc

SEQ ID NO: 49615 - DNA, 20 bp, synthetic construct
  misc_feature 1..20: note = chemically synthesized
  source 1..20: mol_type = other DNA
ttggaaagccaggctttctg

SEQ ID NO: 49616 - DNA, 20 bp, synthetic construct
  misc_feature 1..20: note = chemically synthesized
  source 1..20: mol_type = other DNA
gttatctttccaatgtgtgc

SEQ ID NO: 49617 - DNA, 20 bp, synthetic construct
  misc_feature 1..20: note = chemically synthesized
  source 1..20: mol_type = other DNA
ccaatgtgtgctggaatgcc

SEQ ID NO: 49618 - DNA, 20 bp, synthetic construct
  misc_feature 1..20: note = chemically synthesized
  source 1..20: mol_type = other DNA
caatgtgtgctggaatgccc

SEQ ID NO: 49619 - DNA, 20 bp, synthetic construct
  misc_feature 1..20: note = chemically synthesized
  source 1..20: mol_type = other DNA
aatgtgtgctggaatgcccg

SEQ ID NO: 49620 - DNA, 20 bp, synthetic construct
  misc_feature 1..20: note = chemically synthesized
  source 1..20: mol_type = other DNA
tgtgtgctggaatgcccggg

SEQ ID NO: 49621 - DNA, 20 bp, synthetic construct
  misc_feature 1..20: note = chemically synthesized
  source 1..20: mol_type = other DNA
tgtgctggaatgcccgggga

SEQ ID NO: 49622 - DNA, 20 bp, synthetic construct
  misc_feature 1..20: note = chemically synthesized
  source 1..20: mol_type = other DNA
gtgctggaatgcccggggag

SEQ ID NO: 49623 - DNA, 20 bp, synthetic construct
  misc_feature 1..20: note = chemically synthesized
  source 1..20: mol_type = other DNA
gaatgcccggggagaggaaa

SEQ ID NO: 49624 - DNA, 20 bp, synthetic construct
  misc_feature 1..20: note = chemically synthesized
  source 1..20: mol_type = other DNA
agaggaaaaagtttctttta

SEQ ID NO: 49625 - DNA, 20 bp, synthetic construct
  misc_feature 1..20: note = chemically synthesized
  source 1..20: mol_type = other DNA
gtttcttttacagccatgct

SEQ ID NO: 49626 - DNA, 20 bp, synthetic construct
  misc_feature 1..20: note = chemically synthesized
  source 1..20: mol_type = other DNA
cttttacagccatgctcagt

SEQ ID NO: 49627 - DNA, 20 bp, synthetic construct
  misc_feature 1..20: note = chemically synthesized
  source 1..20: mol_type = other DNA
ttacagccatgctcagtgag

SEQ ID NO: 49628 - DNA, 20 bp, synthetic construct
  misc_feature 1..20: note = chemically synthesized
  source 1..20: mol_type = other DNA
cagccatgctcagtgagaag

SEQ ID NO: 49629 - DNA, 20 bp, synthetic construct
  misc_feature 1..20: note = chemically synthesized
  source 1..20: mol_type = other DNA
gccatgctcagtgagaagcg

SEQ ID NO: 49630 - DNA, 20 bp, synthetic construct
  misc_feature 1..20: note = chemically synthesized
  source 1..20: mol_type = other DNA
tcttctattcacaaattgct

SEQ ID NO: 49631 - DNA, 20 bp, synthetic construct
  misc_feature 1..20: note = chemically synthesized
  source 1..20: mol_type = other DNA
gcatacacattcacacacca

SEQ ID NO: 49632 - DNA, 20 bp, synthetic construct
  misc_feature 1..20: note = chemically synthesized
  source 1..20: mol_type = other DNA
acacattcacacaccacagt

SEQ ID NO: 49633 - DNA, 20 bp, synthetic construct
  misc_feature 1..20: note = chemically synthesized
  source 1..20: mol_type = other DNA
cacattcacacaccacagtg

SEQ ID NO: 49634 - DNA, 20 bp, synthetic construct
  misc_feature 1..20: note = chemically synthesized
  source 1..20: mol_type = other DNA
attcacacaccacagtgagg

SEQ ID NO: 49635 - DNA, 20 bp, synthetic construct
  misc_feature 1..20: note = chemically synthesized
  source 1..20: mol_type = other DNA
ttaataaaatacatttactt

SEQ ID NO: 49636 - DNA, 20 bp, synthetic construct
  misc_feature 1..20: note = chemically synthesized
  source 1..20: mol_type = other DNA
ataaaatacatttacttcag

SEQ ID NO: 49637 - DNA, 20 bp, synthetic construct
  misc_feature 1..20: note = chemically synthesized
  source 1..20: mol_type = other DNA
acattttgcctataatataa

SEQ ID NO: 49638 - DNA, 20 bp, synthetic construct
  misc_feature 1..20: note = chemically synthesized
  source 1..20: mol_type = other DNA
aaaagtatttttcctattaa

SEQ ID NO: 49639 - DNA, 20 bp, synthetic construct
  misc_feature 1..20: note = chemically synthesized
  source 1..20: mol_type = other DNA
ttaaatccccattgccatat

SEQ ID NO: 49640 - DNA, 20 bp, synthetic construct
  misc_feature 1..20: note = chemically synthesized
  source 1..20: mol_type = other DNA
ccccattgccatatgagccc

SEQ ID NO: 49641 - DNA, 20 bp, synthetic construct
  misc_feature 1..20: note = chemically synthesized
  source 1..20: mol_type = other DNA
ccattgccatatgagccctg

SEQ ID NO: 49642 - DNA, 20 bp, synthetic construct
  misc_feature 1..20: note = chemically synthesized
  source 1..20: mol_type = other DNA
cattgccatatgagccctgg

SEQ ID NO: 49643 - DNA, 20 bp, synthetic construct
  misc_feature 1..20: note = chemically synthesized
  source 1..20: mol_type = other DNA
tatgagccctggaggtgaat

SEQ ID NO: 49644 - DNA, 20 bp, synthetic construct
  misc_feature 1..20: note = chemically synthesized
  source 1..20: mol_type = other DNA
tgagccctggaggtgaatca

SEQ ID NO: 49645 - DNA, 20 bp, synthetic construct
  misc_feature 1..20: note = chemically synthesized
  source 1..20: mol_type = other DNA
gaggtgaatcagagaaacaa

SEQ ID NO: 49646 - DNA, 20 bp, synthetic construct
  misc_feature 1..20: note = chemically synthesized
  source 1..20: mol_type = other DNA
aggtgaatcagagaaacaaa

SEQ ID NO: 49647 - DNA, 20 bp, synthetic construct
  misc_feature 1..20: note = chemically synthesized
  source 1..20: mol_type = other DNA
tcagagaaacaaaaggattg

SEQ ID NO: 49648 - DNA, 20 bp, synthetic construct
  misc_feature 1..20: note = chemically synthesized
  source 1..20: mol_type = other DNA
aaggattgtggaaaaatcat

SEQ ID NO: 49649 - DNA, 20 bp, synthetic construct
  misc_feature 1..20: note = chemically synthesized
  source 1..20: mol_type = other DNA
aggattgtggaaaaatcatc

SEQ ID NO: 49650 - DNA, 20 bp, synthetic construct
  misc_feature 1..20: note = chemically synthesized
  source 1..20: mol_type = other DNA
aaaaatcatcaggttaaaaa

SEQ ID NO: 49651 - DNA, 20 bp, synthetic construct
  misc_feature 1..20: note = chemically synthesized
  source 1..20: mol_type = other DNA
aagaaaaattgattctgttt

SEQ ID NO: 49652 - DNA, 20 bp, synthetic construct
  misc_feature 1..20: note = chemically synthesized
  source 1..20: mol_type = other DNA
agaaaaattgattctgtttt

SEQ ID NO: 49653 - DNA, 20 bp, synthetic construct
  misc_feature 1..20: note = chemically synthesized
  source 1..20: mol_type = other DNA
ttctgttttgggatatttcc

SEQ ID NO: 49654 - DNA, 20 bp, synthetic construct
  misc_feature 1..20: note = chemically synthesized
  source 1..20: mol_type = other DNA
gggatatttcctagcaacat

SEQ ID NO: 49655 - DNA, 20 bp, synthetic construct
  misc_feature 1..20: note = chemically synthesized
  source 1..20: mol_type = other DNA
tatttcctagcaacatgagc

SEQ ID NO: 49656 - DNA, 20 bp, synthetic construct
  misc_feature 1..20: note = chemically synthesized
  source 1..20: mol_type = other DNA
atttcctagcaacatgagct

SEQ ID NO: 49657 - DNA, 20 bp, synthetic construct
  misc_feature 1..20: note = chemically synthesized
  source 1..20: mol_type = other DNA
tttcctagcaacatgagctg

SEQ ID NO: 49658 - DNA, 20 bp, synthetic construct
  misc_feature 1..20: note = chemically synthesized
  source 1..20: mol_type = other DNA
tcctagcaacatgagctggg

SEQ ID NO: 49659 - DNA, 20 bp, synthetic construct
  misc_feature 1..20: note = chemically synthesized
  source 1..20: mol_type = other DNA
cctagcaacatgagctgggg

SEQ ID NO: 49660 - DNA, 20 bp, synthetic construct
  misc_feature 1..20: note = chemically synthesized
  source 1..20: mol_type = other DNA
ctagcaacatgagctgggga

SEQ ID NO: 49661 - DNA, 20 bp, synthetic construct
  misc_feature 1..20: note = chemically synthesized
  source 1..20: mol_type = other DNA
tagcaacatgagctggggag

SEQ ID NO: 49662 - DNA, 20 bp, synthetic construct
  misc_feature 1..20: note = chemically synthesized
  source 1..20: mol_type = other DNA
atgagctggggaggggatct

SEQ ID NO: 49663 - DNA, 20 bp, synthetic construct
  misc_feature 1..20: note = chemically synthesized
  source 1..20: mol_type = other DNA
agctggggaggggatctcag

SEQ ID NO: 49664 - DNA, 20 bp, synthetic construct
  misc_feature 1..20: note = chemically synthesized
  source 1..20: mol_type = other DNA
ctcagcagtgatgctctatg

SEQ ID NO: 49665 - DNA, 20 bp, synthetic construct
  misc_feature 1..20: note = chemically synthesized
  source 1..20: mol_type = other DNA
tgaagcataataaaatgaca

SEQ ID NO: 49666 - DNA, 20 bp, synthetic construct
  misc_feature 1..20: note = chemically synthesized
  source 1..20: mol_type = other DNA
ataataaaatgacacagtta

SEQ ID NO: 49667 - DNA, 20 bp, synthetic construct
  misc_feature 1..20: note = chemically synthesized
  source 1..20: mol_type = other DNA
taataaaatgacacagttac

SEQ ID NO: 49668 - DNA, 20 bp, synthetic construct
  misc_feature 1..20: note = chemically synthesized
  source 1..20: mol_type = other DNA
tgacacagttacaggtaact

SEQ ID NO: 49669 - DNA, 20 bp, synthetic construct
  misc_feature 1..20: note = chemically synthesized
  source 1..20: mol_type = other DNA
agttacaggtaacttagtta

SEQ ID NO: 49670 - DNA, 20 bp, synthetic construct
  misc_feature 1..20: note = chemically synthesized
  source 1..20: mol_type = other DNA
gttacaggtaacttagttaa

SEQ ID NO: 49671 - DNA, 20 bp, synthetic construct
  misc_feature 1..20: note = chemically synthesized
  source 1..20: mol_type = other DNA
ttacaggtaacttagttaaa

SEQ ID NO: 49672 - DNA, 20 bp, synthetic construct
  misc_feature 1..20: note = chemically synthesized
  source 1..20: mol_type = other DNA
tacaggtaacttagttaaag

SEQ ID NO: 49673 - DNA, 20 bp, synthetic construct
  misc_feature 1..20: note = chemically synthesized
  source 1..20: mol_type = other DNA
acaggtaacttagttaaagg

SEQ ID NO: 49674 - DNA, 20 bp, synthetic construct
  misc_feature 1..20: note = chemically synthesized
  source 1..20: mol_type = other DNA
tagttaaagggggaaataaa

SEQ ID NO: 49675 - DNA, 20 bp, synthetic construct
  misc_feature 1..20: note = chemically synthesized
  source 1..20: mol_type = other DNA
ttaaagggggaaataaatgg

SEQ ID NO: 49676 - DNA, 20 bp, synthetic construct
  misc_feature 1..20: note = chemically synthesized
  source 1..20: mol_type = other DNA
ctctttttgaatatcaattg

SEQ ID NO: 49677 - DNA, 20 bp, synthetic construct
  misc_feature 1..20: note = chemically synthesized
  source 1..20: mol_type = other DNA
atgtttaactgaactcactg

SEQ ID NO: 49678 - DNA, 20 bp, synthetic construct
  misc_feature 1..20: note = chemically synthesized
  source 1..20: mol_type = other DNA
tgtttaactgaactcactgt

SEQ ID NO: 49679 - DNA, 20 bp, synthetic construct
  misc_feature 1..20: note = chemically synthesized
  source 1..20: mol_type = other DNA
ttaactgaactcactgtagg

SEQ ID NO: 49680 - DNA, 20 bp, synthetic construct
  misc_feature 1..20: note = chemically synthesized
  source 1..20: mol_type = other DNA
ttaatttattgtgtgttttg

SEQ ID NO: 49681 - DNA, 20 bp, synthetic construct
  misc_feature 1..20: note = chemically synthesized
  source 1..20: mol_type = other DNA
gtgttttgaagtcacactgt

SEQ ID NO: 49682 - DNA, 20 bp, synthetic construct
  misc_feature 1..20: note = chemically synthesized
  source 1..20: mol_type = other DNA
tgaagtcacactgtgagcta

SEQ ID NO: 49683 - DNA, 20 bp, synthetic construct
  misc_feature 1..20: note = chemically synthesized
  source 1..20: mol_type = other DNA
gtgagctatagaatttaccc

SEQ ID NO: 49684 - DNA, 20 bp, synthetic construct
  misc_feature 1..20: note = chemically synthesized
  source 1..20: mol_type = other DNA
tacccaagcacaactcttcc

SEQ ID NO: 49685 - DNA, 20 bp, synthetic construct
  misc_feature 1..20: note = chemically synthesized
  source 1..20: mol_type = other DNA
aagcacaactcttcctggaa

SEQ ID NO: 49686 - DNA, 20 bp, synthetic construct
  misc_feature 1..20: note = chemically synthesized
  source 1..20: mol_type = other DNA
gcacaactcttcctggaaaa

SEQ ID NO: 49687 - DNA, 20 bp, synthetic construct
  misc_feature 1..20: note = chemically synthesized
  source 1..20: mol_type = other DNA
acaactcttcctggaaaaga

SEQ ID NO: 49688 - DNA, 20 bp, synthetic construct
  misc_feature 1..20: note = chemically synthesized
  source 1..20: mol_type = other DNA
ctggaaaagagagttcaaat

SEQ ID NO: 49689 - DNA, 20 bp, synthetic construct
  misc_feature 1..20: note = chemically synthesized
  source 1..20: mol_type = other DNA
aagagagttcaaatgagaaa

SEQ ID NO: 49690 - DNA, 20 bp, synthetic construct
  misc_feature 1..20: note = chemically synthesized
  source 1..20: mol_type = other DNA
agttcaaatgagaaacagtg

SEQ ID NO: 49691 - DNA, 20 bp, synthetic construct
  misc_feature 1..20: note = chemically synthesized
  source 1..20: mol_type = other DNA
gttcaaatgagaaacagtgc

SEQ ID NO: 49692 - DNA, 20 bp, synthetic construct
  misc_feature 1..20: note = chemically synthesized
  source 1..20: mol_type = other DNA
ttcaaatgagaaacagtgcg

SEQ ID NO: 49693 - DNA, 20 bp, synthetic construct
  misc_feature 1..20: note = chemically synthesized
  source 1..20: mol_type = other DNA
atgagaaacagtgcggggtg

SEQ ID NO: 49694 - DNA, 20 bp, synthetic construct
  misc_feature 1..20: note = chemically synthesized
  source 1..20: mol_type = other DNA
aacagtgcggggtgaagaca

SEQ ID NO: 49695 - DNA, 20 bp, synthetic construct
  misc_feature 1..20: note = chemically synthesized
  source 1..20: mol_type = other DNA
gcggggtgaagacatggata

SEQ ID NO: 49696 - DNA, 20 bp, synthetic construct
  misc_feature 1..20: note = chemically synthesized
  source 1..20: mol_type = other DNA
cggggtgaagacatggatat

SEQ ID NO: 49697 - DNA, 20 bp, synthetic construct
  misc_feature 1..20: note = chemically synthesized
  source 1..20: mol_type = other DNA
gatattttgatatatctatc

SEQ ID NO: 49698 - DNA, 20 bp, synthetic construct
  misc_feature 1..20: note = chemically synthesized
  source 1..20: mol_type = other DNA
tatatctatcaagtgctttt

SEQ ID NO: 49699 - DNA, 20 bp, synthetic construct
  misc_feature 1..20: note = chemically synthesized
  source 1..20: mol_type = other DNA
atctatcaagtgctttttag

SEQ ID NO: 49700 - DNA, 20 bp, synthetic construct
  misc_feature 1..20: note = chemically synthesized
  source 1..20: mol_type = other DNA
tcaagtgctttttagtggat

SEQ ID NO: 49701 - DNA, 20 bp, synthetic construct
  misc_feature 1..20: note = chemically synthesized
  source 1..20: mol_type = other DNA
caagtgctttttagtggatt

SEQ ID NO: 49702 - DNA, 20 bp, synthetic construct
  misc_feature 1..20: note = chemically synthesized
  source 1..20: mol_type = other DNA
gctttttagtggattaggtt

SEQ ID NO: 49703 - DNA, 20 bp, synthetic construct
  misc_feature 1..20: note = chemically synthesized
  source 1..20: mol_type = other DNA
ggattaggttcagaatgcat

SEQ ID NO: 49704 - DNA, 20 bp, synthetic construct
  misc_feature 1..20: note = chemically synthesized
  source 1..20: mol_type = other DNA
ccaatgcctgttcaataatc

SEQ ID NO: 49705 - DNA, 20 bp, synthetic construct
  misc_feature 1..20: note = chemically synthesized
  source 1..20: mol_type = other DNA
tgttcaataatccagttttc

SEQ ID NO: 49706 - DNA, 20 bp, synthetic construct
  misc_feature 1..20: note = chemically synthesized
  source 1..20: mol_type = other DNA
aataatccagttttccagca

SEQ ID NO: 49707 - DNA, 20 bp, synthetic construct
  misc_feature 1..20: note = chemically synthesized
  source 1..20: mol_type = other DNA
taatccagttttccagcata

SEQ ID NO: 49708 - DNA, 20 bp, synthetic construct
  misc_feature 1..20: note = chemically synthesized
  source 1..20: mol_type = other DNA
agcatagagcatattaaatt

SEQ ID NO: 49709 - DNA, 20 bp, synthetic construct
  misc_feature 1..20: note = chemically synthesized
  source 1..20: mol_type = other DNA
gcatagagcatattaaattg

SEQ ID NO: 49710 - DNA, 20 bp, synthetic construct
  misc_feature 1..20: note = chemically synthesized
  source 1..20: mol_type = other DNA
tagagcatattaaattgagg

SEQ ID NO: 49711 - DNA, 20 bp, synthetic construct
  misc_feature 1..20: note = chemically synthesized
  source 1..20: mol_type = other DNA
agagcatattaaattgagga

SEQ ID NO: 49712 - DNA, 20 bp, synthetic construct
  misc_feature 1..20: note = chemically synthesized
  source 1..20: mol_type = other DNA
tattaaattgaggaaggaca

SEQ ID NO: 49713 - DNA, 20 bp, synthetic construct
  misc_feature 1..20: note = chemically synthesized
  source 1..20: mol_type = other DNA
attgaggaaggacaaagtca

SEQ ID NO: 49714 - DNA, 20 bp, synthetic construct
  misc_feature 1..20: note = chemically synthesized
  source 1..20: mol_type = other DNA
tgaggaaggacaaagtcaca

SEQ ID NO: 49715 - DNA, 20 bp, synthetic construct
  misc_feature 1..20: note = chemically synthesized
  source 1..20: mol_type = other DNA
gaggaaggacaaagtcacag

SEQ ID NO: 49716 - DNA, 20 bp, synthetic construct
  misc_feature 1..20: note = chemically synthesized
  source 1..20: mol_type = other DNA
gaaggacaaagtcacagagg

SEQ ID NO: 49717 - DNA, 20 bp, synthetic construct
  misc_feature 1..20: note = chemically synthesized
  source 1..20: mol_type = other DNA
aaggacaaagtcacagaggt

SEQ ID NO: 49718 - DNA, 20 bp, synthetic construct
  misc_feature 1..20: note = chemically synthesized
  source 1..20: mol_type = other DNA
aggacaaagtcacagaggtg

SEQ ID NO: 49719 - DNA, 20 bp, synthetic construct
  misc_feature 1..20: note = chemically synthesized
  source 1..20: mol_type = other DNA
gacaaagtcacagaggtggg

SEQ ID NO: 49720 - DNA, 20 bp, synthetic construct
  misc_feature 1..20: note = chemically synthesized
  source 1..20: mol_type = other DNA
aaagtcacagaggtggggag

SEQ ID NO: 49721 - DNA, 20 bp, synthetic construct
  misc_feature 1..20: note = chemically synthesized
  source 1..20: mol_type = other DNA
aagtcacagaggtggggagc

SEQ ID NO: 49722 - DNA, 20 bp, synthetic construct
  misc_feature 1..20: note = chemically synthesized
  source 1..20: mol_type = other DNA
tcacagaggtggggagcagg

SEQ ID NO: 49723 - DNA, 20 bp, synthetic construct
  misc_feature 1..20: note = chemically synthesized
  source 1..20: mol_type = other DNA
ggtggggagcaggtggactg

SEQ ID NO: 49724 - DNA, 20 bp, synthetic construct
  misc_feature 1..20: note = chemically synthesized
  source 1..20: mol_type = other DNA
ggagcaggtggactgtggcc

SEQ ID NO: 49725 - DNA, 20 bp, synthetic construct
  misc_feature 1..20: note = chemically synthesized
  source 1..20: mol_type = other DNA
gagcaggtggactgtggcca

SEQ ID NO: 49726 - DNA, 20 bp, synthetic construct
  misc_feature 1..20: note = chemically synthesized
  source 1..20: mol_type = other DNA
gccaaggactttgcatgaaa

SEQ ID NO: 49727 - DNA, 20 bp, synthetic construct
  misc_feature 1..20: note = chemically synthesized
  source 1..20: mol_type = other DNA
aggactttgcatgaaacagt

SEQ ID NO: 49728 - DNA, 20 bp, synthetic construct
  misc_feature 1..20: note = chemically synthesized
  source 1..20: mol_type = other DNA
tcctccttgccctgccctca

SEQ ID NO: 49729 - DNA, 20 bp, synthetic construct
  misc_feature 1..20: note = chemically synthesized
  source 1..20: mol_type = other DNA
cctcatggtctgtgtactct

SEQ ID NO: 49730 - DNA, 20 bp, synthetic construct
  misc_feature 1..20: note = chemically synthesized
  source 1..20: mol_type = other DNA
ctcatggtctgtgtactctc

SEQ ID NO: 49731 - DNA, 20 bp, synthetic construct
  misc_feature 1..20: note = chemically synthesized
  source 1..20: mol_type = other DNA
catggtctgtgtactctcag

SEQ ID NO: 49732 - DNA, 20 bp, synthetic construct
  misc_feature 1..20: note = chemically synthesized
  source 1..20: mol_type = other DNA
atggtctgtgtactctcagg

SEQ ID NO: 49733 - DNA, 20 bp, synthetic construct
  misc_feature 1..20: note = chemically synthesized
  source 1..20: mol_type = other DNA
tctgtgtactctcaggaggt

SEQ ID NO: 49734 - DNA, 20 bp, synthetic construct
  misc_feature 1..20: note = chemically synthesized
  source 1..20: mol_type = other DNA
ctgtgtactctcaggaggtc

SEQ ID NO: 49735 - DNA, 20 bp, synthetic construct
  misc_feature 1..20: note = chemically synthesized
  source 1..20: mol_type = other DNA
gtactctcaggaggtcagga

SEQ ID NO: 49736 - DNA, 20 bp, synthetic construct
  misc_feature 1..20: note = chemically synthesized
  source 1..20: mol_type = other DNA
tactctcaggaggtcaggac

SEQ ID NO: 49737 - DNA, 20 bp, synthetic construct
  misc_feature 1..20: note = chemically synthesized
  source 1..20: mol_type = other DNA
aggtcaggacaggcctttct

SEQ ID NO: 49738 - DNA, 20 bp, synthetic construct
  misc_feature 1..20: note = chemically synthesized
  source 1..20: mol_type = other DNA
ggacaggcctttctgagaat

SEQ ID NO: 49739 - DNA, 20 bp, synthetic construct
  misc_feature 1..20: note = chemically synthesized
  source 1..20: mol_type = other DNA
ctgttcatctgcctttctac

SEQ ID NO: 49740 - DNA, 20 bp, synthetic construct
  misc_feature 1..20: note = chemically synthesized
  source 1..20: mol_type = other DNA
ttctactggatacttgtcat

SEQ ID NO: 49741 - DNA, 20 bp, synthetic construct
  misc_feature 1..20: note = chemically synthesized
  source 1..20: mol_type = other DNA
atacaaacacatgttctctg

SEQ ID NO: 49742 - DNA, 20 bp, synthetic construct
  misc_feature 1..20: note = chemically synthesized
  source 1..20: mol_type = other DNA
ctctgcagtgtgtcatcttt

SEQ ID NO: 49743 - DNA, 20 bp, synthetic construct
  misc_feature 1..20: note = chemically synthesized
  source 1..20: mol_type = other DNA
tcccctgaccctgtattccc

SEQ ID NO: 49744 - DNA, 20 bp, synthetic construct
  misc_feature 1..20: note = chemically synthesized
  source 1..20: mol_type = other DNA
cctgaccctgtattccctag

SEQ ID NO: 49745 - DNA, 20 bp, synthetic construct
  misc_feature 1..20: note = chemically synthesized
  source 1..20: mol_type = other DNA
cctagaagtctcgctgcttt

SEQ ID NO: 49746 - DNA, 20 bp, synthetic construct
  misc_feature 1..20: note = chemically synthesized
  source 1..20: mol_type = other DNA
tagaagtctcgctgctttca

SEQ ID NO: 49747 - DNA, 20 bp, synthetic construct
  misc_feature 1..20: note = chemically synthesized
  source 1..20: mol_type = other DNA
agtctcgctgctttcagagc

SEQ ID NO: 49748 - DNA, 20 bp, synthetic construct
  misc_feature 1..20: note = chemically synthesized
  source 1..20: mol_type = other DNA
gtctcgctgctttcagagcc

SEQ ID NO: 49749 - DNA, 20 bp, synthetic construct
  misc_feature 1..20: note = chemically synthesized
  source 1..20: mol_type = other DNA
tgccacccccactgctcttc

SEQ ID NO: 49750 - DNA, 20 bp, synthetic construct
  misc_feature 1..20: note = chemically synthesized
  source 1..20: mol_type = other DNA
taacccactccatctgcatg

SEQ ID NO: 49751 - DNA, 20 bp, synthetic construct
  misc_feature 1..20: note = chemically synthesized
  source 1..20: mol_type = other DNA
ggcccccaccacacccctca

SEQ ID NO: 49752 - DNA, 20 bp, synthetic construct
  misc_feature 1..20: note = chemically synthesized
  source 1..20: mol_type = other DNA
ccccaccacacccctcaaag

SEQ ID NO: 49753 - DNA, 20 bp, synthetic construct
  misc_feature 1..20: note = chemically synthesized
  source 1..20: mol_type = other DNA
ccacacccctcaaagtggtc

SEQ ID NO: 49754 - DNA, 20 bp, synthetic construct
  misc_feature 1..20: note = chemically synthesized
  source 1..20: mol_type = other DNA
cacacccctcaaagtggtca

SEQ ID NO: 49755 - DNA, 20 bp, synthetic construct
  misc_feature 1..20: note = chemically synthesized
  source 1..20: mol_type = other DNA
tgtcctgttgcttaattcca

SEQ ID NO: 49756 - DNA, 20 bp, synthetic construct
  misc_feature 1..20: note = chemically synthesized
  source 1..20: mol_type = other DNA
cctgttgcttaattccatgg

SEQ ID NO: 49757 - DNA, 20 bp, synthetic construct
  misc_feature 1..20: note = chemically synthesized
  source 1..20: mol_type = other DNA
tgcttaattccatggaagct

SEQ ID NO: 49758 - DNA, 20 bp, synthetic construct
  misc_feature 1..20: note = chemically synthesized
  source 1..20: mol_type = other DNA
cttggctatcttcattttat

SEQ ID NO: 49759 - DNA, 20 bp, synthetic construct
  misc_feature 1..20: note = chemically synthesized
  source 1..20: mol_type = other DNA
ttcattttattagcctcttt

SEQ ID NO: 49760 - DNA, 20 bp, synthetic construct
  misc_feature 1..20: note = chemically synthesized
  source 1..20: mol_type = other DNA
aaaatcactacattttgtgc

SEQ ID NO: 49761 - DNA, 20 bp, synthetic construct
  misc_feature 1..20: note = chemically synthesized
  source 1..20: mol_type = other DNA
aatcactacattttgtgcca

SEQ ID NO: 49762 - DNA, 20 bp, synthetic construct
  misc_feature 1..20: note = chemically synthesized
  source 1..20: mol_type = other DNA
actacattttgtgccagaga

SEQ ID NO: 49763 - DNA, 20 bp, synthetic construct
  misc_feature 1..20: note = chemically synthesized
  source 1..20: mol_type = other DNA
tacattttgtgccagagatg

SEQ ID NO: 49764 - DNA, 20 bp, synthetic construct
  misc_feature 1..20: note = chemically synthesized
  source 1..20: mol_type = other DNA
ttttgtgccagagatggagc

SEQ ID NO: 49765 - DNA, 20 bp, synthetic construct
  misc_feature 1..20: note = chemically synthesized
  source 1..20: mol_type = other DNA
agagatggagctggcatctc

SEQ ID NO: 49766 - DNA, 20 bp, synthetic construct
  misc_feature 1..20: note = chemically synthesized
  source 1..20: mol_type = other DNA
gagatggagctggcatctcc

SEQ ID NO: 49767 - DNA, 20 bp, synthetic construct
  misc_feature 1..20: note = chemically synthesized
  source 1..20: mol_type = other DNA
ggagctggcatctccaggct

SEQ ID NO: 49768 - DNA, 20 bp, synthetic construct
  misc_feature 1..20: note = chemically synthesized
  source 1..20: mol_type = other DNA
gctggcatctccaggcttgg

SEQ ID NO: 49769 - DNA, 20 bp, synthetic construct
  misc_feature 1..20: note = chemically synthesized
  source 1..20: mol_type = other DNA
tggcatctccaggcttggaa

SEQ ID NO: 49770 - DNA, 20 bp, synthetic construct
  misc_feature 1..20: note = chemically synthesized
  source 1..20: mol_type = other DNA
ggcatctccaggcttggaag

SEQ ID NO: 49771 - DNA, 20 bp, synthetic construct
  misc_feature 1..20: note = chemically synthesized
  source 1..20: mol_type = other DNA
gcatctccaggcttggaaga

SEQ ID NO: 49772 - DNA, 20 bp, synthetic construct
  misc_feature 1..20: note = chemically synthesized
  source 1..20: mol_type = other DNA
ggcttggaagagggctgctg

SEQ ID NO: 49773 - DNA, 20 bp, synthetic construct
  misc_feature 1..20: note = chemically synthesized
  source 1..20: mol_type = other DNA
ggaagagggctgctgaagct

SEQ ID NO: 49774 - DNA, 20 bp, synthetic construct
  misc_feature 1..20: note = chemically synthesized
  source 1..20: mol_type = other DNA
gagggctgctgaagctcagc

SEQ ID NO: 49775 - DNA, 20 bp, synthetic construct
  misc_feature 1..20: note = chemically synthesized
  source 1..20: mol_type = other DNA
agggctgctgaagctcagcc

SEQ ID NO: 49776 - DNA, 20 bp, synthetic construct
  misc_feature 1..20: note = chemically synthesized
  source 1..20: mol_type = other DNA
gaagctcagccaggtgtcct

SEQ ID NO: 49777 - DNA, 20 bp, synthetic construct
  misc_feature 1..20: note = chemically synthesized
  source 1..20: mol_type = other DNA
aagctcagccaggtgtccta

SEQ ID NO: 49778 - DNA, 20 bp, synthetic construct
  misc_feature 1..20: note = chemically synthesized
  source 1..20: mol_type = other DNA
gctcagccaggtgtcctaag

SEQ ID NO: 49779 - DNA, 20 bp, synthetic construct
  misc_feature 1..20: note = chemically synthesized
  source 1..20: mol_type = other DNA
ccaggtgtcctaaggagcct

SEQ ID NO: 49780 - DNA, 20 bp, synthetic construct
  misc_feature 1..20: note = chemically synthesized
  source 1..20: mol_type = other DNA
caggtgtcctaaggagcctc

SEQ ID NO: 49781 - DNA, 20 bp, synthetic construct
  misc_feature 1..20: note = chemically synthesized
  source 1..20: mol_type = other DNA
tgtcctaaggagcctcagga

SEQ ID NO: 49782 - DNA, 20 bp, synthetic construct
  misc_feature 1..20: note = chemically synthesized
  source 1..20: mol_type = other DNA
gtcctaaggagcctcaggac

SEQ ID NO: 49783 - DNA, 20 bp, synthetic construct
  misc_feature 1..20: note = chemically synthesized
  source 1..20: mol_type = other DNA
tcctaaggagcctcaggaca

SEQ ID NO: 49784 - DNA, 20 bp, synthetic construct
  misc_feature 1..20: note = chemically synthesized
  source 1..20: mol_type = other DNA
cctaaggagcctcaggacag

SEQ ID NO: 49785 - DNA, 20 bp, synthetic construct
  misc_feature 1..20: note = chemically synthesized
  source 1..20: mol_type = other DNA
gcctcaggacaggggatgct

SEQ ID NO: 49786 - DNA, 20 bp, synthetic construct
  misc_feature 1..20: note = chemically synthesized
  source 1..20: mol_type = other DNA
tcaggacaggggatgctcag

SEQ ID NO: 49787 - DNA, 20 bp, synthetic construct
  misc_feature 1..20: note = chemically synthesized
  source 1..20: mol_type = other DNA
gatgctcagtagccttgcaa

SEQ ID NO: 49788 - DNA, 20 bp, synthetic construct
  misc_feature 1..20: note = chemically synthesized
  source 1..20: mol_type = other DNA
atgctcagtagccttgcaat

SEQ ID NO: 49789 - DNA, 20 bp, synthetic construct
  misc_feature 1..20: note = chemically synthesized
  source 1..20: mol_type = other DNA
gtagccttgcaatgggaaca

SEQ ID NO: 49790 - DNA, 20 bp, synthetic construct
  misc_feature 1..20: note = chemically synthesized
  source 1..20: mol_type = other DNA
cttgcaatgggaacacagct

SEQ ID NO: 49791 - DNA, 20 bp, synthetic construct
  misc_feature 1..20: note = chemically synthesized
  source 1..20: mol_type = other DNA
gaacacagctgagccccact

SEQ ID NO: 49792 - DNA, 20 bp, synthetic construct
  misc_feature 1..20: note = chemically synthesized
  source 1..20: mol_type = other DNA
tggccaccctttgccacaac

SEQ ID NO: 49793 - DNA, 20 bp, synthetic construct
  misc_feature 1..20: note = chemically synthesized
  source 1..20: mol_type = other DNA
ggccaccctttgccacaacc

SEQ ID NO: 49794 - DNA, 20 bp, synthetic construct
  misc_feature 1..20: note = chemically synthesized
  source 1..20: mol_type = other DNA
caccctttgccacaaccagg

SEQ ID NO: 49795 - DNA, 20 bp, synthetic construct
  misc_feature 1..20: note = chemically synthesized
  source 1..20: mol_type = other DNA
ctttgccacaaccaggcaga

SEQ ID NO: 49796 - DNA, 20 bp, synthetic construct
  misc_feature 1..20: note = chemically synthesized
  source 1..20: mol_type = other DNA
tgccacaaccaggcagaaag

SEQ ID NO: 49797 - DNA, 20 bp, synthetic construct
  misc_feature 1..20: note = chemically synthesized
  source 1..20: mol_type = other DNA
ggcagaaagcagcttttgaa

SEQ ID NO: 49798 - DNA, 20 bp, synthetic construct
  misc_feature 1..20: note = chemically synthesized
  source 1..20: mol_type = other DNA
tttgaacagatttgttgcct

SEQ ID NO: 49799 - DNA, 20 bp, synthetic construct
  misc_feature 1..20: note = chemically synthesized
  source 1..20: mol_type = other DNA
ttgcctcagatttgatctca

SEQ ID NO: 49800 - DNA, 20 bp, synthetic construct
  misc_feature 1..20: note = chemically synthesized
  source 1..20: mol_type = other DNA
ttgatctcaaagaaaaatcg

SEQ ID NO: 49801 - DNA, 20 bp, synthetic construct
  misc_feature 1..20: note = chemically synthesized
  source 1..20: mol_type = other DNA
tgatctcaaagaaaaatcgt

SEQ ID NO: 49802 - DNA, 20 bp, synthetic construct
  misc_feature 1..20: note = chemically synthesized
  source 1..20: mol_type = other DNA
tctcaaagaaaaatcgtggg

SEQ ID NO: 49803 - DNA, 20 bp, synthetic construct
  misc_feature 1..20: note = chemically synthesized
  source 1..20: mol_type = other DNA
agaaaaatcgtgggcagtat

SEQ ID NO: 49804 - DNA, 20 bp, synthetic construct
  misc_feature 1..20: note = chemically synthesized
  source 1..20: mol_type = other DNA
atcgtgggcagtattggtcc

SEQ ID NO: 49805 - DNA, 20 bp, synthetic construct
  misc_feature 1..20: note = chemically synthesized
  source 1..20: mol_type = other DNA
tcgtgggcagtattggtccc

SEQ ID NO: 49806 - DNA, 20 bp, synthetic construct
  misc_feature 1..20: note = chemically synthesized
  source 1..20: mol_type = other DNA
ttacaatttcctctgaaatc

SEQ ID NO: 49807 - DNA, 20 bp, synthetic construct
  misc_feature 1..20: note = chemically synthesized
  source 1..20: mol_type = other DNA
ctggatgcctatcaacacct

SEQ ID NO: 49808 - DNA, 20 bp, synthetic construct
  misc_feature 1..20: note = chemically synthesized
  source 1..20: mol_type = other DNA
actgaattctccccaactaa

SEQ ID NO: 49809 - DNA, 20 bp, synthetic construct
  misc_feature 1..20: note = chemically synthesized
  source 1..20: mol_type = other DNA
gaattctccccaactaatag

SEQ ID NO: 49810 - DNA, 20 bp, synthetic construct
  misc_feature 1..20: note = chemically synthesized
  source 1..20: mol_type = other DNA
ctaatagtggtgtgtcactg

SEQ ID NO: 49811 - DNA, 20 bp, synthetic construct
  misc_feature 1..20: note = chemically synthesized
  source 1..20: mol_type = other DNA
tagtggtgtgtcactgtagt

SEQ ID NO: 49812 - DNA, 20 bp, synthetic construct
  misc_feature 1..20: note = chemically synthesized
  source 1..20: mol_type = other DNA
gtgtgtcactgtagtaagcc

SEQ ID NO: 49813 - DNA, 20 bp, synthetic construct
  misc_feature 1..20: note = chemically synthesized
  source 1..20: mol_type = other DNA
tagtaagcctagtacaaaaa

SEQ ID NO: 49814 - DNA, 20 bp, synthetic construct
  misc_feature 1..20: note = chemically synthesized
  source 1..20: mol_type = other DNA
tacaaaaatggccttctttg

SEQ ID NO: 49815 - DNA, 20 bp, synthetic construct
  misc_feature 1..20: note = chemically synthesized
  source 1..20: mol_type = other DNA
caaaaatggccttctttgtg

SEQ ID NO: 49816 - DNA, 20 bp, synthetic construct
  misc_feature 1..20: note = chemically synthesized
  source 1..20: mol_type = other DNA
aaaaatggccttctttgtgg

SEQ ID NO: 49817 - DNA, 20 bp, synthetic construct
  misc_feature 1..20: note = chemically synthesized
  source 1..20: mol_type = other DNA
aaatggccttctttgtggag

SEQ ID NO: 49818 - DNA, 20 bp, synthetic construct
  misc_feature 1..20: note = chemically synthesized
  source 1..20: mol_type = other DNA
tttttgcttaatttttgccc

SEQ ID NO: 49819 - DNA, 20 bp, synthetic construct
  misc_feature 1..20: note = chemically synthesized
  source 1..20: mol_type = other DNA
gcttaatttttgcccaagat

SEQ ID NO: 49820 - DNA, 20 bp, synthetic construct
  misc_feature 1..20: note = chemically synthesized
  source 1..20: mol_type = other DNA
cccaagatgagaacataatt

SEQ ID NO: 49821 - DNA, 20 bp, synthetic construct
  misc_feature 1..20: note = chemically synthesized
  source 1..20: mol_type = other DNA
caccaacatttttgtaacta

SEQ ID NO: 49822 - DNA, 20 bp, synthetic construct
  misc_feature 1..20: note = chemically synthesized
  source 1..20: mol_type = other DNA
accaacatttttgtaactaa

SEQ ID NO: 49823 - DNA, 20 bp, synthetic construct
  misc_feature 1..20: note = chemically synthesized
  source 1..20: mol_type = other DNA
caacatttttgtaactaaag

SEQ ID NO: 49824 - DNA, 20 bp, synthetic construct
  misc_feature 1..20: note = chemically synthesized
  source 1..20: mol_type = other DNA
aacatttttgtaactaaagg

SEQ ID NO: 49825 - DNA, 20 bp, synthetic construct
  misc_feature 1..20: note = chemically synthesized
  source 1..20: mol_type = other DNA
acatttttgtaactaaagga

SEQ ID NO: 49826 - DNA, 20 bp, synthetic construct
  misc_feature 1..20: note = chemically synthesized
  source 1..20: mol_type = other DNA
taactaaaggagggaccatt

SEQ ID NO: 49827 - DNA, 20 bp, synthetic construct
  misc_feature 1..20: note = chemically synthesized
  source 1..20: mol_type = other DNA
ctaaaggagggaccattcag

SEQ ID NO: 49828 - DNA, 20 bp, synthetic construct
  misc_feature 1..20: note = chemically synthesized
  source 1..20: mol_type = other DNA
aagatgcttatcaactgtca

SEQ ID NO: 49829 - DNA, 20 bp, synthetic construct
  misc_feature 1..20: note = chemically synthesized
  source 1..20: mol_type = other DNA
cttatcaactgtcaaagtga

SEQ ID NO: 49830 - DNA, 20 bp, synthetic construct
  misc_feature 1..20: note = chemically synthesized
  source 1..20: mol_type = other DNA
acaaccaatgcacatattgt

SEQ ID NO: 49831 - DNA, 20 bp, synthetic construct
  misc_feature 1..20: note = chemically synthesized
  source 1..20: mol_type = other DNA
tattgtaagaaatcaaacaa

SEQ ID NO: 49832 - DNA, 20 bp, synthetic construct
  misc_feature 1..20: note = chemically synthesized
  source 1..20: mol_type = other DNA
gaaatcaaacaatggcctcc

SEQ ID NO: 49833 - DNA, 20 bp, synthetic construct
  misc_feature 1..20: note = chemically synthesized
  source 1..20: mol_type = other DNA
aaatcaaacaatggcctcca

SEQ ID NO: 49834 - DNA, 20 bp, synthetic construct
  misc_feature 1..20: note = chemically synthesized
  source 1..20: mol_type = other DNA
ctccaaggttcatttctaca

SEQ ID NO: 49835 - DNA, 20 bp, synthetic construct
  misc_feature 1..20: note = chemically synthesized
  source 1..20: mol_type = other DNA
tccaaggttcatttctacac

SEQ ID NO: 49836 - DNA, 20 bp, synthetic construct
  misc_feature 1..20: note = chemically synthesized
  source 1..20: mol_type = other DNA
ccaaggttcatttctacaca

SEQ ID NO: 49837 - DNA, 20 bp, synthetic construct
  misc_feature 1..20: note = chemically synthesized
  source 1..20: mol_type = other DNA
gttcatttctacacagggat

SEQ ID NO: 49838 - DNA, 20 bp, synthetic construct
  misc_feature 1..20: note = chemically synthesized
  source 1..20: mol_type = other DNA
catttctacacagggattag

SEQ ID NO: 49839 - DNA, 20 bp, synthetic construct
  misc_feature 1..20: note = chemically synthesized
  source 1..20: mol_type = other DNA
tagcagatcaacatcaatct

SEQ ID NO: 49840 - DNA, 20 bp, synthetic construct
  misc_feature 1..20: note = chemically synthesized
  source 1..20: mol_type = other DNA
caacatcaatcttggcaaca

SEQ ID NO: 49841 - DNA, 20 bp, synthetic construct
  misc_feature 1..20: note = chemically synthesized
  source 1..20: mol_type = other DNA
ggcaacacagttgccactga

SEQ ID NO: 49842 - DNA, 20 bp, synthetic construct
  misc_feature 1..20: note = chemically synthesized
  source 1..20: mol_type = other DNA
ttattttttttatcatgaca

SEQ ID NO: 49843 - DNA, 20 bp, synthetic construct
  misc_feature 1..20: note = chemically synthesized
  source 1..20: mol_type = other DNA
tttatcatgacatggcaatc

SEQ ID NO: 49844 - DNA, 20 bp, synthetic construct
  misc_feature 1..20: note = chemically synthesized
  source 1..20: mol_type = other DNA
tatcatgacatggcaatcaa

SEQ ID NO: 49845 - DNA, 20 bp, synthetic construct
  misc_feature 1..20: note = chemically synthesized
  source 1..20: mol_type = other DNA
aacatgatttattcttattt

SEQ ID NO: 49846 - DNA, 20 bp, synthetic construct
  misc_feature 1..20: note = chemically synthesized
  source 1..20: mol_type = other DNA
tattcttatttaagatttta

SEQ ID NO: 49847 - DNA, 20 bp, synthetic construct
  misc_feature 1..20: note = chemically synthesized
  source 1..20: mol_type = other DNA
cttatttaagattttatggt

SEQ ID NO: 49848 - DNA, 20 bp, synthetic construct
  misc_feature 1..20: note = chemically synthesized
  source 1..20: mol_type = other DNA
ttaagattttatggttagac

SEQ ID NO: 49849 - DNA, 20 bp, synthetic construct
  misc_feature 1..20: note = chemically synthesized
  source 1..20: mol_type = other DNA
taagattttatggttagact

SEQ ID NO: 49850 - DNA, 20 bp, synthetic construct
  misc_feature 1..20: note = chemically synthesized
  source 1..20: mol_type = other DNA
gattttatggttagactagg

SEQ ID NO: 49851 - DNA, 20 bp, synthetic construct
  misc_feature 1..20: note = chemically synthesized
  source 1..20: mol_type = other DNA
ttatggttagactaggcaga

SEQ ID NO: 49852 - DNA, 20 bp, synthetic construct
  misc_feature 1..20: note = chemically synthesized
  source 1..20: mol_type = other DNA
ggttagactaggcagatagc

SEQ ID NO: 49853 - DNA, 20 bp, synthetic construct
  misc_feature 1..20: note = chemically synthesized
  source 1..20: mol_type = other DNA
ctaggcagatagctagatat

SEQ ID NO: 49854 - DNA, 20 bp, synthetic construct
  misc_feature 1..20: note = chemically synthesized
  source 1..20: mol_type = other DNA
ggcagatagctagatatgag

SEQ ID NO: 49855 - DNA, 20 bp, synthetic construct
  misc_feature 1..20: note = chemically synthesized
  source 1..20: mol_type = other DNA
gcagatagctagatatgagc

SEQ ID NO: 49856 - DNA, 20 bp, synthetic construct
  misc_feature 1..20: note = chemically synthesized
  source 1..20: mol_type = other DNA
agatagctagatatgagcag

SEQ ID NO: 49857 - DNA, 20 bp, synthetic construct
  misc_feature 1..20: note = chemically synthesized
  source 1..20: mol_type = other DNA
gatagctagatatgagcagg

SEQ ID NO: 49858 - DNA, 20 bp, synthetic construct
  misc_feature 1..20: note = chemically synthesized
  source 1..20: mol_type = other DNA
agctagatatgagcaggagg

SEQ ID NO: 49859 - DNA, 20 bp, synthetic construct
  misc_feature 1..20: note = chemically synthesized
  source 1..20: mol_type = other DNA
tagatatgagcaggaggtgg

SEQ ID NO: 49860 - DNA, 20 bp, synthetic construct
  misc_feature 1..20: note = chemically synthesized
  source 1..20: mol_type = other DNA
agcaggaggtggaagcccct

SEQ ID NO: 49861 - DNA, 20 bp, synthetic construct
  misc_feature 1..20: note = chemically synthesized
  source 1..20: mol_type = other DNA
caggaggtggaagcccctga

SEQ ID NO: 49862 - DNA, 20 bp, synthetic construct
  misc_feature 1..20: note = chemically synthesized
  source 1..20: mol_type = other DNA
ggtggaagcccctgagagaa

SEQ ID NO: 49863 - DNA, 20 bp, synthetic construct
  misc_feature 1..20: note = chemically synthesized
  source 1..20: mol_type = other DNA
tggaagcccctgagagaatg

SEQ ID NO: 49864 - DNA, 20 bp, synthetic construct
  misc_feature 1..20: note = chemically synthesized
  source 1..20: mol_type = other DNA
ggaagcccctgagagaatgg

SEQ ID NO: 49865 - DNA, 20 bp, synthetic construct
  misc_feature 1..20: note = chemically synthesized
  source 1..20: mol_type = other DNA
cccctgagagaatggaggtc

SEQ ID NO: 49866 - DNA, 20 bp, synthetic construct
  misc_feature 1..20: note = chemically synthesized
  source 1..20: mol_type = other DNA
cctgagagaatggaggtctg

SEQ ID NO: 49867 - DNA, 20 bp, synthetic construct
  misc_feature 1..20: note = chemically synthesized
  source 1..20: mol_type = other DNA
gtctggagaatctgaaaccc

SEQ ID NO: 49868 - DNA, 20 bp, synthetic construct
  misc_feature 1..20: note = chemically synthesized
  source 1..20: mol_type = other DNA
ctggagaatctgaaacccca

SEQ ID NO: 49869 - DNA, 20 bp, synthetic construct
  misc_feature 1..20: note = chemically synthesized
  source 1..20: mol_type = other DNA
tgaaaccccagagattaccc

SEQ ID NO: 49870 - DNA, 20 bp, synthetic construct
  misc_feature 1..20: note = chemically synthesized
  source 1..20: mol_type = other DNA
attacccaagtcctgcatgc

SEQ ID NO: 49871 - DNA, 20 bp, synthetic construct
  misc_feature 1..20: note = chemically synthesized
  source 1..20: mol_type = other DNA
aagtcctgcatgctagacat

SEQ ID NO: 49872 - DNA, 20 bp, synthetic construct
  misc_feature 1..20: note = chemically synthesized
  source 1..20: mol_type = other DNA
tcctgcatgctagacatgag

SEQ ID NO: 49873 - DNA, 20 bp, synthetic construct
  misc_feature 1..20: note = chemically synthesized
  source 1..20: mol_type = other DNA
ctgcatgctagacatgagtg

SEQ ID NO: 49874 - DNA, 20 bp, synthetic construct
  misc_feature 1..20: note = chemically synthesized
  source 1..20: mol_type = other DNA
tgcatgctagacatgagtgg

SEQ ID NO: 49875 - DNA, 20 bp, synthetic construct
  misc_feature 1..20: note = chemically synthesized
  source 1..20: mol_type = other DNA
catgctagacatgagtggag

SEQ ID NO: 49876 - DNA, 20 bp, synthetic construct
  misc_feature 1..20: note = chemically synthesized
  source 1..20: mol_type = other DNA
atgctagacatgagtggagg

SEQ ID NO: 49877 - DNA, 20 bp, synthetic construct
  misc_feature 1..20: note = chemically synthesized
  source 1..20: mol_type = other DNA
tgctagacatgagtggagga

SEQ ID NO: 49878 - DNA, 20 bp, synthetic construct
  misc_feature 1..20: note = chemically synthesized
  source 1..20: mol_type = other DNA
gctagacatgagtggaggag

SEQ ID NO: 49879 - DNA, 20 bp, synthetic construct
  misc_feature 1..20: note = chemically synthesized
  source 1..20: mol_type = other DNA
ctagacatgagtggaggagg

SEQ ID NO: 49880 - DNA, 20 bp, synthetic construct
  misc_feature 1..20: note = chemically synthesized
  source 1..20: mol_type = other DNA
agtggaggagggggaatacc

SEQ ID NO: 49881 - DNA, 20 bp, synthetic construct
  misc_feature 1..20: note = chemically synthesized
  source 1..20: mol_type = other DNA
gtggaggagggggaatacct

SEQ ID NO: 49882 - DNA, 20 bp, synthetic construct
  misc_feature 1..20: note = chemically synthesized
  source 1..20: mol_type = other DNA
gaggagggggaatacctagg

SEQ ID NO: 49883 - DNA, 20 bp, synthetic construct
  misc_feature 1..20: note = chemically synthesized
  source 1..20: mol_type = other DNA
gggggaatacctaggtagaa

SEQ ID NO: 49884 - DNA, 20 bp, synthetic construct
  misc_feature 1..20: note = chemically synthesized
  source 1..20: mol_type = other DNA
ggtagaaaagaatgcccctt

SEQ ID NO: 49885 - DNA, 20 bp, synthetic construct
  misc_feature 1..20: note = chemically synthesized
  source 1..20: mol_type = other DNA
agaatgccccttaagatgcc

SEQ ID NO: 49886 - DNA, 20 bp, synthetic construct
  misc_feature 1..20: note = chemically synthesized
  source 1..20: mol_type = other DNA
atgccccttaagatgcccag

SEQ ID NO: 49887 - DNA, 20 bp, synthetic construct
  misc_feature 1..20: note = chemically synthesized
  source 1..20: mol_type = other DNA
cccagcagtcgctcactgtg

SEQ ID NO: 49888 - DNA, 20 bp, synthetic construct
  misc_feature 1..20: note = chemically synthesized
  source 1..20: mol_type = other DNA
tcactgtgcagttaactttt

SEQ ID NO: 49889 - DNA, 20 bp, synthetic construct
  misc_feature 1..20: note = chemically synthesized
  source 1..20: mol_type = other DNA
ttaacttttcagaatgctgc

SEQ ID NO: 49890 - DNA, 20 bp, synthetic construct
  misc_feature 1..20: note = chemically synthesized
  source 1..20: mol_type = other DNA
tgctgctagatacatgctga

SEQ ID NO: 49891 - DNA, 20 bp, synthetic construct
  misc_feature 1..20: note = chemically synthesized
  source 1..20: mol_type = other DNA
gctgctagatacatgctgat

SEQ ID NO: 49892 - DNA, 20 bp, synthetic construct
  misc_feature 1..20: note = chemically synthesized
  source 1..20: mol_type = other DNA
ctgctagatacatgctgata

SEQ ID NO: 49893 - DNA, 20 bp, synthetic construct
  misc_feature 1..20: note = chemically synthesized
  source 1..20: mol_type = other DNA
gctagatacatgctgatagg

SEQ ID NO: 49894 - DNA, 20 bp, synthetic construct
  misc_feature 1..20: note = chemically synthesized
  source 1..20: mol_type = other DNA
ctagatacatgctgataggg

SEQ ID NO: 49895 - DNA, 20 bp, synthetic construct
  misc_feature 1..20: note = chemically synthesized
  source 1..20: mol_type = other DNA
tagatacatgctgataggga

SEQ ID NO: 49896 - DNA, 20 bp, synthetic construct
  misc_feature 1..20: note = chemically synthesized
  source 1..20: mol_type = other DNA
atacatgctgatagggaggg

SEQ ID NO: 49897 - DNA, 20 bp, synthetic construct
  misc_feature 1..20: note = chemically synthesized
  source 1..20: mol_type = other DNA
acatgctgatagggagggaa

SEQ ID NO: 49898 - DNA, 20 bp, synthetic construct
  misc_feature 1..20: note = chemically synthesized
  source 1..20: mol_type = other DNA
catgctgatagggagggaag

SEQ ID NO: 49899 - DNA, 20 bp, synthetic construct
  misc_feature 1..20: note = chemically synthesized
  source 1..20: mol_type = other DNA
atgctgatagggagggaaga

SEQ ID NO: 49900 - DNA, 20 bp, synthetic construct
  misc_feature 1..20: note = chemically synthesized
  source 1..20: mol_type = other DNA
gatagggagggaagagggca

SEQ ID NO: 49901 - DNA, 20 bp, synthetic construct
  misc_feature 1..20: note = chemically synthesized
  source 1..20: mol_type = other DNA
atagggagggaagagggcaa

SEQ ID NO: 49902 - DNA, 20 bp, synthetic construct
  misc_feature 1..20: note = chemically synthesized
  source 1..20: mol_type = other DNA
agggagggaagagggcaaag

SEQ ID NO: 49903 - DNA, 20 bp, synthetic construct
  misc_feature 1..20: note = chemically synthesized
  source 1..20: mol_type = other DNA
agggcaaaggagaaattcct

SEQ ID NO: 49904 - DNA, 20 bp, synthetic construct
  misc_feature 1..20: note = chemically synthesized
  source 1..20: mol_type = other DNA
ggcaaaggagaaattcctaa

SEQ ID NO: 49905 - DNA, 20 bp, synthetic construct
  misc_feature 1..20: note = chemically synthesized
  source 1..20: mol_type = other DNA
agaaattcctaagagataca

SEQ ID NO: 49906 - DNA, 20 bp, synthetic construct
  misc_feature 1..20: note = chemically synthesized
  source 1..20: mol_type = other DNA
tcctaagagatacacggttg

SEQ ID NO: 49907 - DNA, 20 bp, synthetic construct
  misc_feature 1..20: note = chemically synthesized
  source 1..20: mol_type = other DNA
aagagatacacggttgcagt

SEQ ID NO: 49908 - DNA, 20 bp, synthetic construct
  misc_feature 1..20: note = chemically synthesized
  source 1..20: mol_type = other DNA
gttgcagttagtatacatct

SEQ ID NO: 49909 - DNA, 20 bp, synthetic construct
  misc_feature 1..20: note = chemically synthesized
  source 1..20: mol_type = other DNA
gagtgctatacaaccttctt

SEQ ID NO: 49910 - DNA, 20 bp, synthetic construct
  misc_feature 1..20: note = chemically synthesized
  source 1..20: mol_type = other DNA
agtgctatacaaccttcttt

SEQ ID NO: 49911 - DNA, 20 bp, synthetic construct
  misc_feature 1..20: note = chemically synthesized
  source 1..20: mol_type = other DNA
gctatacaaccttctttggg

SEQ ID NO: 49912 - DNA, 20 bp, synthetic construct
  misc_feature 1..20: note = chemically synthesized
  source 1..20: mol_type = other DNA
atacaaccttctttgggtgg

SEQ ID NO: 49913 - DNA, 20 bp, synthetic construct
  misc_feature 1..20: note = chemically synthesized
  source 1..20: mol_type = other DNA
aaccttctttgggtggtggc

SEQ ID NO: 49914 - DNA, 20 bp, synthetic construct
  misc_feature 1..20: note = chemically synthesized
  source 1..20: mol_type = other DNA
cttctttgggtggtggcaag

SEQ ID NO: 49915 - DNA, 20 bp, synthetic construct
  misc_feature 1..20: note = chemically synthesized
  source 1..20: mol_type = other DNA
ggtggtggcaagaagcaatg

SEQ ID NO: 49916 - DNA, 20 bp, synthetic construct
  misc_feature 1..20: note = chemically synthesized
  source 1..20: mol_type = other DNA
gaagcaatgcagccattacg

SEQ ID NO: 49917 - DNA, 20 bp, synthetic construct
  misc_feature 1..20: note = chemically synthesized
  source 1..20: mol_type = other DNA
catatcaaacacctgtatca

SEQ ID NO: 49918 - DNA, 20 bp, synthetic construct
  misc_feature 1..20: note = chemically synthesized
  source 1..20: mol_type = other DNA
atatcaaacacctgtatcac

SEQ ID NO: 49919 - DNA, 20 bp, synthetic construct
  misc_feature 1..20: note = chemically synthesized
  source 1..20: mol_type = other DNA
cacctgtatcacaggtgtta

SEQ ID NO: 49920 - DNA, 20 bp, synthetic construct
  misc_feature 1..20: note = chemically synthesized
  source 1..20: mol_type = other DNA
atcacaggtgttaaagaaac

SEQ ID NO: 49921 - DNA, 20 bp, synthetic construct
  misc_feature 1..20: note = chemically synthesized
  source 1..20: mol_type = other DNA
atgatttgcaatattgtctt

SEQ ID NO: 49922 - DNA, 20 bp, synthetic construct
  misc_feature 1..20: note = chemically synthesized
  source 1..20: mol_type = other DNA
ctataaatatgatttttaaa

SEQ ID NO: 49923 - DNA, 20 bp, synthetic construct
  misc_feature 1..20: note = chemically synthesized
  source 1..20: mol_type = other DNA
atttttaaaaagtatttctt

SEQ ID NO: 49924 - DNA, 20 bp, synthetic construct
  misc_feature 1..20: note = chemically synthesized
  source 1..20: mol_type = other DNA
tttttaaaaagtatttcttt

SEQ ID NO: 49925 - DNA, 20 bp, synthetic construct
  misc_feature 1..20: note = chemically synthesized
  source 1..20: mol_type = other DNA
taaaaagtatttctttaggt

SEQ ID NO: 49926 - DNA, 20 bp, synthetic construct
  misc_feature 1..20: note = chemically synthesized
  source 1..20: mol_type = other DNA
tacgcattgacttatcttcc

SEQ ID NO: 49927 - DNA, 20 bp, synthetic construct
  misc_feature 1..20: note = chemically synthesized
  source 1..20: mol_type = other DNA
acgcattgacttatcttcct

SEQ ID NO: 49928 - DNA, 20 bp, synthetic construct
  misc_feature 1..20: note = chemically synthesized
  source 1..20: mol_type = other DNA
cttatcttcctgggtttcat

SEQ ID NO: 49929 - DNA, 20 bp, synthetic construct
  misc_feature 1..20: note = chemically synthesized
  source 1..20: mol_type = other DNA
actgtttatctcaaactctt

SEQ ID NO: 49930 - DNA, 20 bp, synthetic construct
  misc_feature 1..20: note = chemically synthesized
  source 1..20: mol_type = other DNA
atctcaaactcttgagatta

SEQ ID NO: 49931 - DNA, 20 bp, synthetic construct
  misc_feature 1..20: note = chemically synthesized
  source 1..20: mol_type = other DNA
aaactcttgagattaaagta

SEQ ID NO: 49932 - DNA, 20 bp, synthetic construct
  misc_feature 1..20: note = chemically synthesized
  source 1..20: mol_type = other DNA
aactcttgagattaaagtat

SEQ ID NO: 49933 - DNA, 20 bp, synthetic construct
  misc_feature 1..20: note = chemically synthesized
  source 1..20: mol_type = other DNA
ttgagattaaagtatgggct

SEQ ID NO: 49934 - DNA, 20 bp, synthetic construct
  misc_feature 1..20: note = chemically synthesized
  source 1..20: mol_type = other DNA
tgagattaaagtatgggctc

SEQ ID NO: 49935 - DNA, 20 bp, synthetic construct
  misc_feature 1..20: note = chemically synthesized
  source 1..20: mol_type = other DNA
agattaaagtatgggctcag

SEQ ID NO: 49936 - DNA, 20 bp, synthetic construct
  misc_feature 1..20: note = chemically synthesized
  source 1..20: mol_type = other DNA
gattaaagtatgggctcagg

SEQ ID NO: 49937 - DNA, 20 bp, synthetic construct
  misc_feature 1..20: note = chemically synthesized
  source 1..20: mol_type = other DNA
attaaagtatgggctcagga

SEQ ID NO: 49938 - DNA, 20 bp, synthetic construct
  misc_feature 1..20: note = chemically synthesized
  source 1..20: mol_type = other DNA
taaagtatgggctcaggagg

SEQ ID NO: 49939 - DNA, 20 bp, synthetic construct
  misc_feature 1..20: note = chemically synthesized
  source 1..20: mol_type = other DNA
gtatgggctcaggagggagc

SEQ ID NO: 49940 - DNA, 20 bp, synthetic construct
  misc_feature 1..20: note = chemically synthesized
  source 1..20: mol_type = other DNA
tatgggctcaggagggagcg

SEQ ID NO: 49941 - DNA, 20 bp, synthetic construct
  misc_feature 1..20: note = chemically synthesized
  source 1..20: mol_type = other DNA
tgggctcaggagggagcgag

SEQ ID NO: 49942 - DNA, 20 bp, synthetic construct
  misc_feature 1..20: note = chemically synthesized
  source 1..20: mol_type = other DNA
caggagggagcgaggagctt

SEQ ID NO: 49943 - DNA, 20 bp, synthetic construct
  misc_feature 1..20: note = chemically synthesized
  source 1..20: mol_type = other DNA
aggagggagcgaggagcttc

SEQ ID NO: 49944 - DNA, 20 bp, synthetic construct
  misc_feature 1..20: note = chemically synthesized
  source 1..20: mol_type = other DNA
gaggagcttcaggactctca

SEQ ID NO: 49945 - DNA, 20 bp, synthetic construct
  misc_feature 1..20: note = chemically synthesized
  source 1..20: mol_type = other DNA
tcaggactctcacggacctc

SEQ ID NO: 49946 - DNA, 20 bp, synthetic construct
  misc_feature 1..20: note = chemically synthesized
  source 1..20: mol_type = other DNA
actctcacggacctccagca

SEQ ID NO: 49947 - DNA, 20 bp, synthetic construct
  misc_feature 1..20: note = chemically synthesized
  source 1..20: mol_type = other DNA
cacggacctccagcacagtg

SEQ ID NO: 49948 - DNA, 20 bp, synthetic construct
  misc_feature 1..20: note = chemically synthesized
  source 1..20: mol_type = other DNA
agcacagtgtagctgcctta

SEQ ID NO: 49949 - DNA, 20 bp, synthetic construct
  misc_feature 1..20: note = chemically synthesized
  source 1..20: mol_type = other DNA
agtgtagctgccttatggaa

SEQ ID NO: 49950 - DNA, 20 bp, synthetic construct
  misc_feature 1..20: note = chemically synthesized
  source 1..20: mol_type = other DNA
gtagctgccttatggaaaag

SEQ ID NO: 49951 - DNA, 20 bp, synthetic construct
  misc_feature 1..20: note = chemically synthesized
  source 1..20: mol_type = other DNA
ggccacactgttttctgcac

SEQ ID NO: 49952 - DNA, 20 bp, synthetic construct
  misc_feature 1..20: note = chemically synthesized
  source 1..20: mol_type = other DNA
ctgcccctactattcctcac

SEQ ID NO: 49953 - DNA, 20 bp, synthetic construct
  misc_feature 1..20: note = chemically synthesized
  source 1..20: mol_type = other DNA
tgcccctactattcctcact

SEQ ID NO: 49954 - DNA, 20 bp, synthetic construct
  misc_feature 1..20: note = chemically synthesized
  source 1..20: mol_type = other DNA
ccctactattcctcactggg

SEQ ID NO: 49955 - DNA, 20 bp, synthetic construct
  misc_feature 1..20: note = chemically synthesized
  source 1..20: mol_type = other DNA
ctactattcctcactgggca

SEQ ID NO: 49956 - DNA, 20 bp, synthetic construct
  misc_feature 1..20: note = chemically synthesized
  source 1..20: mol_type = other DNA
attcctcactgggcagagca

SEQ ID NO: 49957 - DNA, 20 bp, synthetic construct
  misc_feature 1..20: note = chemically synthesized
  source 1..20: mol_type = other DNA
tgggcagagcacagccaccc

SEQ ID NO: 49958 - DNA, 20 bp, synthetic construct
  misc_feature 1..20: note = chemically synthesized
  source 1..20: mol_type = other DNA
ctggccctgcctgaacattt

SEQ ID NO: 49959 - DNA, 20 bp, synthetic construct
  misc_feature 1..20: note = chemically synthesized
  source 1..20: mol_type = other DNA
ccctgcctgaacattttagt

SEQ ID NO: 49960 - DNA, 20 bp, synthetic construct
  misc_feature 1..20: note = chemically synthesized
  source 1..20: mol_type = other DNA
ctgaacattttagtcagtgt

SEQ ID NO: 49961 - DNA, 20 bp, synthetic construct
  misc_feature 1..20: note = chemically synthesized
  source 1..20: mol_type = other DNA
gtgttggctctgtgcttctc

SEQ ID NO: 49962 - DNA, 20 bp, synthetic construct
  misc_feature 1..20: note = chemically synthesized
  source 1..20: mol_type = other DNA
tgttggctctgtgcttctct

SEQ ID NO: 49963 - DNA, 20 bp, synthetic construct
  misc_feature 1..20: note = chemically synthesized
  source 1..20: mol_type = other DNA
gttggctctgtgcttctctg

SEQ ID NO: 49964 - DNA, 20 bp, synthetic construct
  misc_feature 1..20: note = chemically synthesized
  source 1..20: mol_type = other DNA
tggctctgtgcttctctggg

SEQ ID NO: 49965 - DNA, 20 bp, synthetic construct
  misc_feature 1..20: note = chemically synthesized
  source 1..20: mol_type = other DNA
ggctctgtgcttctctgggg

SEQ ID NO: 49966 - DNA, 20 bp, synthetic construct
  misc_feature 1..20: note = chemically synthesized
  source 1..20: mol_type = other DNA
cttctctggggaggaaatcc

SEQ ID NO: 49967 - DNA, 20 bp, synthetic construct
  misc_feature 1..20: note = chemically synthesized
  source 1..20: mol_type = other DNA
tctctggggaggaaatccaa

SEQ ID NO: 49968 - DNA, 20 bp, synthetic construct
  misc_feature 1..20: note = chemically synthesized
  source 1..20: mol_type = other DNA
gaaatccaagagacaaccca

SEQ ID NO: 49969 - DNA, 20 bp, synthetic construct
  misc_feature 1..20: note = chemically synthesized
  source 1..20: mol_type = other DNA
ccacagcccctctgccattt

SEQ ID NO: 49970 - DNA, 20 bp, synthetic construct
  misc_feature 1..20: note = chemically synthesized
  source 1..20: mol_type = other DNA
cccctctgccatttcagctg

SEQ ID NO: 49971 - DNA, 20 bp, synthetic construct
  misc_feature 1..20: note = chemically synthesized
  source 1..20: mol_type = other DNA
ctctgccatttcagctgcag

SEQ ID NO: 49972 - DNA, 20 bp, synthetic construct
  misc_feature 1..20: note = chemically synthesized
  source 1..20: mol_type = other DNA
agtaccaccgttaatgccct

SEQ ID NO: 49973 - DNA, 20 bp, synthetic construct
  misc_feature 1..20: note = chemically synthesized
  source 1..20: mol_type = other DNA
gtaccaccgttaatgccctt

SEQ ID NO: 49974 - DNA, 20 bp, synthetic construct
  misc_feature 1..20: note = chemically synthesized
  source 1..20: mol_type = other DNA
ccgttaatgcccttgggctt

SEQ ID NO: 49975 - DNA, 20 bp, synthetic construct
  misc_feature 1..20: note = chemically synthesized
  source 1..20: mol_type = other DNA
taatgcccttgggcttgaga

SEQ ID NO: 49976 - DNA, 20 bp, synthetic construct
  misc_feature 1..20: note = chemically synthesized
  source 1..20: mol_type = other DNA
tgcccttgggcttgagaaag

SEQ ID NO: 49977 - DNA, 20 bp, synthetic construct
  misc_feature 1..20: note = chemically synthesized
  source 1..20: mol_type = other DNA
gcccttgggcttgagaaaga

SEQ ID NO: 49978 - DNA, 20 bp, synthetic construct
  misc_feature 1..20: note = chemically synthesized
  source 1..20: mol_type = other DNA
cccttgggcttgagaaagaa

SEQ ID NO: 49979 - DNA, 20 bp, synthetic construct
  misc_feature 1..20: note = chemically synthesized
  source 1..20: mol_type = other DNA
ggcttgagaaagaagggacc

SEQ ID NO: 49980 - DNA, 20 bp, synthetic construct
  misc_feature 1..20: note = chemically synthesized
  source 1..20: mol_type = other DNA
ggccacttccctgacacctc

SEQ ID NO: 49981 - DNA, 20 bp, synthetic construct
  misc_feature 1..20: note = chemically synthesized
  source 1..20: mol_type = other DNA
tccctgacacctccagcaca

SEQ ID NO: 49982 - DNA, 20 bp, synthetic construct
  misc_feature 1..20: note = chemically synthesized
  source 1..20: mol_type = other DNA
ctgacacctccagcacacag

SEQ ID NO: 49983 - DNA, 20 bp, synthetic construct
  misc_feature 1..20: note = chemically synthesized
  source 1..20: mol_type = other DNA
tgacacctccagcacacagc

SEQ ID NO: 49984 - DNA, 20 bp, synthetic construct
  misc_feature 1..20: note = chemically synthesized
  source 1..20: mol_type = other DNA
gacacctccagcacacagca

SEQ ID NO: 49985 - DNA, 20 bp, synthetic construct
  misc_feature 1..20: note = chemically synthesized
  source 1..20: mol_type = other DNA
cctccagcacacagcaggga

SEQ ID NO: 49986 - DNA, 20 bp, synthetic construct
  misc_feature 1..20: note = chemically synthesized
  source 1..20: mol_type = other DNA
acacagcagggaaagaattc

SEQ ID NO: 49987 - DNA, 20 bp, synthetic construct
  misc_feature 1..20: note = chemically synthesized
  source 1..20: mol_type = other DNA
ttccagtttctctttcttgt

SEQ ID NO: 49988 - DNA, 20 bp, synthetic construct
  misc_feature 1..20: note = chemically synthesized
  source 1..20: mol_type = other DNA
tttcacctgctactcttcac

SEQ ID NO: 49989 - DNA, 20 bp, synthetic construct
  misc_feature 1..20: note = chemically synthesized
  source 1..20: mol_type = other DNA
ttcacctgctactcttcacc

SEQ ID NO: 49990 - DNA, 20 bp, synthetic construct
  misc_feature 1..20: note = chemically synthesized
  source 1..20: mol_type = other DNA
cctgctactcttcaccaggc

SEQ ID NO: 49991 - DNA, 20 bp, synthetic construct
  misc_feature 1..20: note = chemically synthesized
  source 1..20: mol_type = other DNA
ctgctactcttcaccaggca

SEQ ID NO: 49992 - DNA, 20 bp, synthetic construct
  misc_feature 1..20: note = chemically synthesized
  source 1..20: mol_type = other DNA
tcttcaccaggcaaggctcc

SEQ ID NO: 49993 - DNA, 20 bp, synthetic construct
  misc_feature 1..20: note = chemically synthesized
  source 1..20: mol_type = other DNA
accaggcaaggctcctggct

SEQ ID NO: 49994 - DNA, 20 bp, synthetic construct
  misc_feature 1..20: note = chemically synthesized
  source 1..20: mol_type = other DNA
ccaggcaaggctcctggctt

SEQ ID NO: 49995 - DNA, 20 bp, synthetic construct
  misc_feature 1..20: note = chemically synthesized
  source 1..20: mol_type = other DNA
aggctcctggcttgggccca

SEQ ID NO: 49996 - DNA, 20 bp, synthetic construct
  misc_feature 1..20: note = chemically synthesized
  source 1..20: mol_type = other DNA
cctggcttgggcccacagtg

SEQ ID NO: 49997 - DNA, 20 bp, synthetic construct
  misc_feature 1..20: note = chemically synthesized
  source 1..20: mol_type = other DNA
ctggcttgggcccacagtgc

SEQ ID NO: 49998 - DNA, 20 bp, synthetic construct
  misc_feature 1..20: note = chemically synthesized
  source 1..20: mol_type = other DNA
cagtgcaggcacctcgaact

SEQ ID NO: 49999 - DNA, 20 bp, synthetic construct
  misc_feature 1..20: note = chemically synthesized
  source 1..20: mol_type = other DNA
actcagttgaacatttccac

SEQ ID NO: 50000 - DNA, 20 bp, synthetic construct
  misc_feature 1..20: note = chemically synthesized
  source 1..20: mol_type = other DNA
ggctgcactctgtgtttttg

SEQ ID NO: 50001 - DNA, 20 bp, synthetic construct
  misc_feature 1..20: note = chemically synthesized
  source 1..20: mol_type = other DNA
gctgcactctgtgtttttgt

SEQ ID NO: 50002 - DNA, 20 bp, synthetic construct
  misc_feature 1..20: note = chemically synthesized
  source 1..20: mol_type = other DNA
ctgcactctgtgtttttgtg

SEQ ID NO: 50003 - DNA, 20 bp, synthetic construct
  misc_feature 1..20: note = chemically synthesized
  source 1..20: mol_type = other DNA
ctctgtgtttttgtggggtg

SEQ ID NO: 50004 - DNA, 20 bp, synthetic construct
  misc_feature 1..20: note = chemically synthesized
  source 1..20: mol_type = other DNA
tttttgtggggtgaagctcc

SEQ ID NO: 50005 - DNA, 20 bp, synthetic construct
  misc_feature 1..20: note = chemically synthesized
  source 1..20: mol_type = other DNA
tttgtggggtgaagctccca

SEQ ID NO: 50006 - DNA, 20 bp, synthetic construct
  misc_feature 1..20: note = chemically synthesized
  source 1..20: mol_type = other DNA
ttgtggggtgaagctcccag

SEQ ID NO: 50007 - DNA, 20 bp, synthetic construct
  misc_feature 1..20: note = chemically synthesized
  source 1..20: mol_type = other DNA
aagctcccagaggtgactga

SEQ ID NO: 50008 - DNA, 20 bp, synthetic construct
  misc_feature 1..20: note = chemically synthesized
  source 1..20: mol_type = other DNA
tccttctgccactaacactg

SEQ ID NO: 50009 - DNA, 20 bp, synthetic construct
  misc_feature 1..20: note = chemically synthesized
  source 1..20: mol_type = other DNA
catactgcccttgctgtact

SEQ ID NO: 50010 - DNA, 20 bp, synthetic construct
  misc_feature 1..20: note = chemically synthesized
  source 1..20: mol_type = other DNA
tgcccttgctgtacttggac

SEQ ID NO: 50011 - DNA, 20 bp, synthetic construct
  misc_feature 1..20: note = chemically synthesized
  source 1..20: mol_type = other DNA
gcccttgctgtacttggact

SEQ ID NO: 50012 - DNA, 20 bp, synthetic construct
  misc_feature 1..20: note = chemically synthesized
  source 1..20: mol_type = other DNA
cccttgctgtacttggacta

SEQ ID NO: 50013 - DNA, 20 bp, synthetic construct
  misc_feature 1..20: note = chemically synthesized
  source 1..20: mol_type = other DNA
ttgctgtacttggactaggg

SEQ ID NO: 50014 - DNA, 20 bp, synthetic construct
  misc_feature 1..20: note = chemically synthesized
  source 1..20: mol_type = other DNA
tgctgtacttggactaggga

SEQ ID NO: 50015 - DNA, 20 bp, synthetic construct
  misc_feature 1..20: note = chemically synthesized
  source 1..20: mol_type = other DNA
cttggactagggaaggaaaa

SEQ ID NO: 50016 - DNA, 20 bp, synthetic construct
  misc_feature 1..20: note = chemically synthesized
  source 1..20: mol_type = other DNA
agggaaggaaaaaagatcct

SEQ ID NO: 50017 - DNA, 20 bp, synthetic construct
  misc_feature 1..20: note = chemically synthesized
  source 1..20: mol_type = other DNA
tgagtgctttactcacaccc

SEQ ID NO: 50018 - DNA, 20 bp, synthetic construct
  misc_feature 1..20: note = chemically synthesized
  source 1..20: mol_type = other DNA
actcacaccccagtgtgccc

SEQ ID NO: 50019 - DNA, 20 bp, synthetic construct
  misc_feature 1..20: note = chemically synthesized
  source 1..20: mol_type = other DNA
agtgtgccccagccacccta

SEQ ID NO: 50020 - DNA, 20 bp, synthetic construct
  misc_feature 1..20: note = chemically synthesized
  source 1..20: mol_type = other DNA
gccccagccaccctatggaa

SEQ ID NO: 50021 - DNA, 20 bp, synthetic construct
  misc_feature 1..20: note = chemically synthesized
  source 1..20: mol_type = other DNA
cccagccaccctatggaaaa

SEQ ID NO: 50022 - DNA, 20 bp, synthetic construct
  misc_feature 1..20: note = chemically synthesized
  source 1..20: mol_type = other DNA
ccagccaccctatggaaaag

SEQ ID NO: 50023 - DNA, 20 bp, synthetic construct
  misc_feature 1..20: note = chemically synthesized
  source 1..20: mol_type = other DNA
ccaccctatggaaaagaggc

SEQ ID NO: 50024 - DNA, 20 bp, synthetic construct
  misc_feature 1..20: note = chemically synthesized
  source 1..20: mol_type = other DNA
ggccagtgtgtcatccctgc

SEQ ID NO: 50025 - DNA, 20 bp, synthetic construct
  misc_feature 1..20: note = chemically synthesized
  source 1..20: mol_type = other DNA
gtcatccctgcaagcaccct

SEQ ID NO: 50026 - DNA, 20 bp, synthetic construct
  misc_feature 1..20: note = chemically synthesized
  source 1..20: mol_type = other DNA
tcatccctgcaagcaccctg

SEQ ID NO: 50027 - DNA, 20 bp, synthetic construct
  misc_feature 1..20: note = chemically synthesized
  source 1..20: mol_type = other DNA
cccctgcccctgctgccccc

SEQ ID NO: 50028 - DNA, 20 bp, synthetic construct
  misc_feature 1..20: note = chemically synthesized
  source 1..20: mol_type = other DNA
cccctgctgcccccaagctg

SEQ ID NO: 50029 - DNA, 20 bp, synthetic construct
  misc_feature 1..20: note = chemically synthesized
  source 1..20: mol_type = other DNA
cctgctgcccccaagctgta

SEQ ID NO: 50030 - DNA, 20 bp, synthetic construct
  misc_feature 1..20: note = chemically synthesized
  source 1..20: mol_type = other DNA
ctgcccccaagctgtagagc

SEQ ID NO: 50031 - DNA, 20 bp, synthetic construct
  misc_feature 1..20: note = chemically synthesized
  source 1..20: mol_type = other DNA
agctgtagagccagaatata

SEQ ID NO: 50032 - DNA, 20 bp, synthetic construct
  misc_feature 1..20: note = chemically synthesized
  source 1..20: mol_type = other DNA
gtagagccagaatataaagc

SEQ ID NO: 50033 - DNA, 20 bp, synthetic construct
  misc_feature 1..20: note = chemically synthesized
  source 1..20: mol_type = other DNA
gagccagaatataaagctgg

SEQ ID NO: 50034 - DNA, 20 bp, synthetic construct
  misc_feature 1..20: note = chemically synthesized
  source 1..20: mol_type = other DNA
agctggcagaaaaatgtaaa

SEQ ID NO: 50035 - DNA, 20 bp, synthetic construct
  misc_feature 1..20: note = chemically synthesized
  source 1..20: mol_type = other DNA
gctggcagaaaaatgtaaaa

SEQ ID NO: 50036 - DNA, 20 bp, synthetic construct
  misc_feature 1..20: note = chemically synthesized
  source 1..20: mol_type = other DNA
gcagaaaaatgtaaaaaggc

SEQ ID NO: 50037 - DNA, 20 bp, synthetic construct
  misc_feature 1..20: note = chemically synthesized
  source 1..20: mol_type = other DNA
aaaatgtaaaaaggctagac

SEQ ID NO: 50038 - DNA, 20 bp, synthetic construct
  misc_feature 1..20: note = chemically synthesized
  source 1..20: mol_type = other DNA
gtaaaaaggctagactggct

SEQ ID NO: 50039 - DNA, 20 bp, synthetic construct
  misc_feature 1..20: note = chemically synthesized
  source 1..20: mol_type = other DNA
gctagactggcttagcctcc

SEQ ID NO: 50040 - DNA, 20 bp, synthetic construct
  misc_feature 1..20: note = chemically synthesized
  source 1..20: mol_type = other DNA
cctacatctttctcctgtgc

SEQ ID NO: 50041 - DNA, 20 bp, synthetic construct
  misc_feature 1..20: note = chemically synthesized
  source 1..20: mol_type = other DNA
tccttcctgctcttgaacat

SEQ ID NO: 50042 - DNA, 20 bp, synthetic construct
  misc_feature 1..20: note = chemically synthesized
  source 1..20: mol_type = other DNA
gctcttgaacatcggactcc

SEQ ID NO: 50043 - DNA, 20 bp, synthetic construct
  misc_feature 1..20: note = chemically synthesized
  source 1..20: mol_type = other DNA
acatcggactccaagttctt

SEQ ID NO: 50044 - DNA, 20 bp, synthetic construct
  misc_feature 1..20: note = chemically synthesized
  source 1..20: mol_type = other DNA
gactccaagttcttcagctg

SEQ ID NO: 50045 - DNA, 20 bp, synthetic construct
  misc_feature 1..20: note = chemically synthesized
  source 1..20: mol_type = other DNA
actccaagttcttcagctgt

SEQ ID NO: 50046 - DNA, 20 bp, synthetic construct
  misc_feature 1..20: note = chemically synthesized
  source 1..20: mol_type = other DNA
agttcttcagctgtgggact

SEQ ID NO: 50047 - DNA, 20 bp, synthetic construct
  misc_feature 1..20: note = chemically synthesized
  source 1..20: mol_type = other DNA
ggactgtcttccttgctcct

SEQ ID NO: 50048 - DNA, 20 bp, synthetic construct
  misc_feature 1..20: note = chemically synthesized
  source 1..20: mol_type = other DNA
cttccttgctcctcagattg

SEQ ID NO: 50049 - DNA, 20 bp, synthetic construct
  misc_feature 1..20: note = chemically synthesized
  source 1..20: mol_type = other DNA
ttccttgctcctcagattgc

SEQ ID NO: 50050 - DNA, 20 bp, synthetic construct
  misc_feature 1..20: note = chemically synthesized
  source 1..20: mol_type = other DNA
cttgctcctcagattgcagg

SEQ ID NO: 50051 - DNA, 20 bp, synthetic construct
  misc_feature 1..20: note = chemically synthesized
  source 1..20: mol_type = other DNA
agattgcaggtggcctatta

SEQ ID NO: 50052 - DNA, 20 bp, synthetic construct
  misc_feature 1..20: note = chemically synthesized
  source 1..20: mol_type = other DNA
gattgcaggtggcctattat

SEQ ID NO: 50053 - DNA, 20 bp, synthetic construct
  misc_feature 1..20: note = chemically synthesized
  source 1..20: mol_type = other DNA
atgggaccttgtaatcttgt

SEQ ID NO: 50054 - DNA, 20 bp, synthetic construct
  misc_feature 1..20: note = chemically synthesized
  source 1..20: mol_type = other DNA
gtgagttaataccacttaat

SEQ ID NO: 50055 - DNA, 20 bp, synthetic construct
  misc_feature 1..20: note = chemically synthesized
  source 1..20: mol_type = other DNA
taataagctcccctttgtgt

SEQ ID NO: 50056 - DNA, 20 bp, synthetic construct
  misc_feature 1..20: note = chemically synthesized
  source 1..20: mol_type = other DNA
tgtgagtatatctatatcta

SEQ ID NO: 50057 - DNA, 20 bp, synthetic construct
  misc_feature 1..20: note = chemically synthesized
  source 1..20: mol_type = other DNA
agtatatctatatctataga

SEQ ID NO: 50058 - DNA, 20 bp, synthetic construct
  misc_feature 1..20: note = chemically synthesized
  source 1..20: mol_type = other DNA
tctatatctatagatagata

SEQ ID NO: 50059 - DNA, 20 bp, synthetic construct
  misc_feature 1..20: note = chemically synthesized
  source 1..20: mol_type = other DNA
ctatatctatagatagatat

SEQ ID NO: 50060 - DNA, 20 bp, synthetic construct
  misc_feature 1..20: note = chemically synthesized
  source 1..20: mol_type = other DNA
atatatatataatctcctat

SEQ ID NO: 50061 - DNA, 20 bp, synthetic construct
  misc_feature 1..20: note = chemically synthesized
  source 1..20: mol_type = other DNA
tcctattagttctgtccctc

SEQ ID NO: 50062 - DNA, 20 bp, synthetic construct
  misc_feature 1..20: note = chemically synthesized
  source 1..20: mol_type = other DNA
ctattagttctgtccctcta

SEQ ID NO: 50063 - DNA, 20 bp, synthetic construct
  misc_feature 1..20: note = chemically synthesized
  source 1..20: mol_type = other DNA
ctagagaaccccgactaata

SEQ ID NO: 50064 - DNA, 20 bp, synthetic construct
  misc_feature 1..20: note = chemically synthesized
  source 1..20: mol_type = other DNA
actaatacagattttcatac

SEQ ID NO: 50065 - DNA, 20 bp, synthetic construct
  misc_feature 1..20: note = chemically synthesized
  source 1..20: mol_type = other DNA
aatacagattttcataccag

SEQ ID NO: 50066 - DNA, 20 bp, synthetic construct
  misc_feature 1..20: note = chemically synthesized
  source 1..20: mol_type = other DNA
acagattttcataccagaag

SEQ ID NO: 50067 - DNA, 20 bp, synthetic construct
  misc_feature 1..20: note = chemically synthesized
  source 1..20: mol_type = other DNA
tcataccagaagtggttctt

SEQ ID NO: 50068 - DNA, 20 bp, synthetic construct
  misc_feature 1..20: note = chemically synthesized
  source 1..20: mol_type = other DNA
cataccagaagtggttcttg

SEQ ID NO: 50069 - DNA, 20 bp, synthetic construct
  misc_feature 1..20: note = chemically synthesized
  source 1..20: mol_type = other DNA
cagaagtggttcttgaggaa

SEQ ID NO: 50070 - DNA, 20 bp, synthetic construct
  misc_feature 1..20: note = chemically synthesized
  source 1..20: mol_type = other DNA
ttcttgaggaacagaatatt

SEQ ID NO: 50071 - DNA, 20 bp, synthetic construct
  misc_feature 1..20: note = chemically synthesized
  source 1..20: mol_type = other DNA
tcttgaggaacagaatatta

SEQ ID NO: 50072 - DNA, 20 bp, synthetic construct
  misc_feature 1..20: note = chemically synthesized
  source 1..20: mol_type = other DNA
gaggaacagaatattaagga

SEQ ID NO: 50073 - DNA, 20 bp, synthetic construct
  misc_feature 1..20: note = chemically synthesized
  source 1..20: mol_type = other DNA
taaggatggaattctttcat

SEQ ID NO: 50074 - DNA, 20 bp, synthetic construct
  misc_feature 1..20: note = chemically synthesized
  source 1..20: mol_type = other DNA
tggaattctttcattggttt

SEQ ID NO: 50075 - DNA, 20 bp, synthetic construct
  misc_feature 1..20: note = chemically synthesized
  source 1..20: mol_type = other DNA
ggaattctttcattggtttt

SEQ ID NO: 50076 - DNA, 20 bp, synthetic construct
  misc_feature 1..20: note = chemically synthesized
  source 1..20: mol_type = other DNA
ttcattggttttgggacttc

SEQ ID NO: 50077 - DNA, 20 bp, synthetic construct
  misc_feature 1..20: note = chemically synthesized
  source 1..20: mol_type = other DNA
ggttttgggacttctggtgt

SEQ ID NO: 50078 - DNA, 20 bp, synthetic construct
  misc_feature 1..20: note = chemically synthesized
  source 1..20: mol_type = other DNA
tgttggctgattaatatgat

SEQ ID NO: 50079 - DNA, 20 bp, synthetic construct
  misc_feature 1..20: note = chemically synthesized
  source 1..20: mol_type = other DNA
tgattagaccaaaaaatgct

SEQ ID NO: 50080 - DNA, 20 bp, synthetic construct
  misc_feature 1..20: note = chemically synthesized
  source 1..20: mol_type = other DNA
gattagaccaaaaaatgcta

SEQ ID NO: 50081 - DNA, 20 bp, synthetic construct
  misc_feature 1..20: note = chemically synthesized
  source 1..20: mol_type = other DNA
gctaaggactctacttctaa

SEQ ID NO: 50082 - DNA, 20 bp, synthetic construct
  misc_feature 1..20: note = chemically synthesized
  source 1..20: mol_type = other DNA
ggactctacttctaatagta

SEQ ID NO: 50083 - DNA, 20 bp, synthetic construct
  misc_feature 1..20: note = chemically synthesized
  source 1..20: mol_type = other DNA
actctacttctaatagtatg

SEQ ID NO: 50084 - DNA, 20 bp, synthetic construct
  misc_feature 1..20: note = chemically synthesized
  source 1..20: mol_type = other DNA
aatagtatggagaacactga

SEQ ID NO: 50085 - DNA, 20 bp, synthetic construct
  misc_feature 1..20: note = chemically synthesized
  source 1..20: mol_type = other DNA
tggagaacactgatagtact

SEQ ID NO: 50086 - DNA, 20 bp, synthetic construct
  misc_feature 1..20: note = chemically synthesized
  source 1..20: mol_type = other DNA
agtacttggcctgaattgtt

SEQ ID NO: 50087 - DNA, 20 bp, synthetic construct
  misc_feature 1..20: note = chemically synthesized
  source 1..20: mol_type = other DNA
tacttggcctgaattgttta

SEQ ID NO: 50088 - DNA, 20 bp, synthetic construct
  misc_feature 1..20: note = chemically synthesized
  source 1..20: mol_type = other DNA
cttggcctgaattgtttaga

SEQ ID NO: 50089 - DNA, 20 bp, synthetic construct
  misc_feature 1..20: note = chemically synthesized
  source 1..20: mol_type = other DNA
actactgattcatcacttat

SEQ ID NO: 50090 - DNA, 20 bp, synthetic construct
  misc_feature 1..20: note = chemically synthesized
  source 1..20: mol_type = other DNA
tactgattcatcacttatga

SEQ ID NO: 50091 - DNA, 20 bp, synthetic construct
  misc_feature 1..20: note = chemically synthesized
  source 1..20: mol_type = other DNA
actgattcatcacttatgag

SEQ ID NO: 50092 - DNA, 20 bp, synthetic construct
  misc_feature 1..20: note = chemically synthesized
  source 1..20: mol_type = other DNA
attcatcacttatgagaggc

SEQ ID NO: 50093 - DNA, 20 bp, synthetic construct
  misc_feature 1..20: note = chemically synthesized
  source 1..20: mol_type = other DNA
ttcatcacttatgagaggca

SEQ ID NO: 50094 - DNA, 20 bp, synthetic construct
  misc_feature 1..20: note = chemically synthesized
  source 1..20: mol_type = other DNA
catcacttatgagaggcaag

SEQ ID NO: 50095 - DNA, 20 bp, synthetic construct
  misc_feature 1..20: note = chemically synthesized
  source 1..20: mol_type = other DNA
cttatgagaggcaaggagtt

SEQ ID NO: 50096 - DNA, 20 bp, synthetic construct
  misc_feature 1..20: note = chemically synthesized
  source 1..20: mol_type = other DNA
ataatacctttgactatatg

SEQ ID NO: 50097 - DNA, 20 bp, synthetic construct
  misc_feature 1..20: note = chemically synthesized
  source 1..20: mol_type = other DNA
aatacctttgactatatgtg

SEQ ID NO: 50098 - DNA, 20 bp, synthetic construct
  misc_feature 1..20: note = chemically synthesized
  source 1..20: mol_type = other DNA
ttgactatatgtggagaacc

SEQ ID NO: 50099 - DNA, 20 bp, synthetic construct
  misc_feature 1..20: note = chemically synthesized
  source 1..20: mol_type = other DNA
tgactatatgtggagaacca

SEQ ID NO: 50100 - DNA, 20 bp, synthetic construct
  misc_feature 1..20: note = chemically synthesized
  source 1..20: mol_type = other DNA
gagaaccaaggaacataatg

SEQ ID NO: 50101 - DNA, 20 bp, synthetic construct
  misc_feature 1..20: note = chemically synthesized
  source 1..20: mol_type = other DNA
accaaggaacataatgaagt

SEQ ID NO: 50102 - DNA, 20 bp, synthetic construct
  misc_feature 1..20: note = chemically synthesized
  source 1..20: mol_type = other DNA
gaagttggttgattgctcct

SEQ ID NO: 50103 - DNA, 20 bp, synthetic construct
  misc_feature 1..20: note = chemically synthesized
  source 1..20: mol_type = other DNA
ttgattgctcctaagttctc

SEQ ID NO: 50104 - DNA, 20 bp, synthetic construct
  misc_feature 1..20: note = chemically synthesized
  source 1..20: mol_type = other DNA
gattgctcctaagttctctg

SEQ ID NO: 50105 - DNA, 20 bp, synthetic construct
  misc_feature 1..20: note = chemically synthesized
  source 1..20: mol_type = other DNA
gctcctaagttctctggaga

SEQ ID NO: 50106 - DNA, 20 bp, synthetic construct
  misc_feature 1..20: note = chemically synthesized
  source 1..20: mol_type = other DNA
tcctaagttctctggagaaa

SEQ ID NO: 50107 - DNA, 20 bp, synthetic construct
  misc_feature 1..20: note = chemically synthesized
  source 1..20: mol_type = other DNA
ttctctggagaaagagatga

SEQ ID NO: 50108 - DNA, 20 bp, synthetic construct
  misc_feature 1..20: note = chemically synthesized
  source 1..20: mol_type = other DNA
atgaaagaaaatgatgatct

SEQ ID NO: 50109 - DNA, 20 bp, synthetic construct
  misc_feature 1..20: note = chemically synthesized
  source 1..20: mol_type = other DNA
tgaaagaaaatgatgatctc

SEQ ID NO: 50110 - DNA, 20 bp, synthetic construct
  misc_feature 1..20: note = chemically synthesized
  source 1..20: mol_type = other DNA
gaaagaaaatgatgatctca

SEQ ID NO: 50111 - DNA, 20 bp, synthetic construct
  misc_feature 1..20: note = chemically synthesized
  source 1..20: mol_type = other DNA
aaagaaaatgatgatctcag

SEQ ID NO: 50112 - DNA, 20 bp, synthetic construct
  misc_feature 1..20: note = chemically synthesized
  source 1..20: mol_type = other DNA
ggggatctgtctcccacctt

SEQ ID NO: 50113 - DNA, 20 bp, synthetic construct
  misc_feature 1..20: note = chemically synthesized
  source 1..20: mol_type = other DNA
gatctgtctcccaccttcag

SEQ ID NO: 50114 - DNA, 20 bp, synthetic construct
  misc_feature 1..20: note = chemically synthesized
  source 1..20: mol_type = other DNA
ctgtctcccaccttcagaag

SEQ ID NO: 50115 - DNA, 20 bp, synthetic construct
  misc_feature 1..20: note = chemically synthesized
  source 1..20: mol_type = other DNA
caccttcagaagcagatact

SEQ ID NO: 50116 - DNA, 20 bp, synthetic construct
  misc_feature 1..20: note = chemically synthesized
  source 1..20: mol_type = other DNA
tactgagccacaaatctgct

SEQ ID NO: 50117 - DNA, 20 bp, synthetic construct
  misc_feature 1..20: note = chemically synthesized
  source 1..20: mol_type = other DNA
ctgctaagattgccctgaat

SEQ ID NO: 50118 - DNA, 20 bp, synthetic construct
  misc_feature 1..20: note = chemically synthesized
  source 1..20: mol_type = other DNA
gctaagattgccctgaatga

SEQ ID NO: 50119 - DNA, 20 bp, synthetic construct
  misc_feature 1..20: note = chemically synthesized
  source 1..20: mol_type = other DNA
aatgagagttttaactcctg

SEQ ID NO: 50120 - DNA, 20 bp, synthetic construct
  misc_feature 1..20: note = chemically synthesized
  source 1..20: mol_type = other DNA
tgagagttttaactcctgta

SEQ ID NO: 50121 - DNA, 20 bp, synthetic construct
  misc_feature 1..20: note = chemically synthesized
  source 1..20: mol_type = other DNA
agttttaactcctgtagaga

SEQ ID NO: 50122 - DNA, 20 bp, synthetic construct
  misc_feature 1..20: note = chemically synthesized
  source 1..20: mol_type = other DNA
ttttaactcctgtagagaaa

SEQ ID NO: 50123 - DNA, 20 bp, synthetic construct
  misc_feature 1..20: note = chemically synthesized
  source 1..20: mol_type = other DNA
gagttgaaattgtgaaaaaa

SEQ ID NO: 50124 - DNA, 20 bp, synthetic construct
  misc_feature 1..20: note = chemically synthesized
  source 1..20: mol_type = other DNA
gttgaaattgtgaaaaaaca

SEQ ID NO: 50125 - DNA, 20 bp, synthetic construct
  misc_feature 1..20: note = chemically synthesized
  source 1..20: mol_type = other DNA
aattgtgaaaaaacagagac

SEQ ID NO: 50126 - DNA, 20 bp, synthetic construct
  misc_feature 1..20: note = chemically synthesized
  source 1..20: mol_type = other DNA
gagacaagctgttatcatgc

SEQ ID NO: 50127 - DNA, 20 bp, synthetic construct
  misc_feature 1..20: note = chemically synthesized
  source 1..20: mol_type = other DNA
acaagctgttatcatgcgag

SEQ ID NO: 50128 - DNA, 20 bp, synthetic construct
  misc_feature 1..20: note = chemically synthesized
  source 1..20: mol_type = other DNA
gcgagtagctgatctgcaac

SEQ ID NO: 50129 - DNA, 20 bp, synthetic construct
  misc_feature 1..20: note = chemically synthesized
  source 1..20: mol_type = other DNA
gagtagctgatctgcaacaa

SEQ ID NO: 50130 - DNA, 20 bp, synthetic construct
  misc_feature 1..20: note = chemically synthesized
  source 1..20: mol_type = other DNA
agtagctgatctgcaacaag

SEQ ID NO: 50131 - DNA, 20 bp, synthetic construct
  misc_feature 1..20: note = chemically synthesized
  source 1..20: mol_type = other DNA
tgcaacaagaggtgcatgca

SEQ ID NO: 50132 - DNA, 20 bp, synthetic construct
  misc_feature 1..20: note = chemically synthesized
  source 1..20: mol_type = other DNA
aggtgcatgcacagccttgc

SEQ ID NO: 50133 - DNA, 20 bp, synthetic construct
  misc_feature 1..20: note = chemically synthesized
  source 1..20: mol_type = other DNA
ggtgcatgcacagccttgcc

SEQ ID NO: 50134 - DNA, 20 bp, synthetic construct
  misc_feature 1..20: note = chemically synthesized
  source 1..20: mol_type = other DNA
ttgccaggtgtttactgtta

SEQ ID NO: 50135 - DNA, 20 bp, synthetic construct
  misc_feature 1..20: note = chemically synthesized
  source 1..20: mol_type = other DNA
caggtgtttactgttaaagt

SEQ ID NO: 50136 - DNA, 20 bp, synthetic construct
  misc_feature 1..20: note = chemically synthesized
  source 1..20: mol_type = other DNA
aggtgtttactgttaaagtg

SEQ ID NO: 50137 - DNA, 20 bp, synthetic construct
  misc_feature 1..20: note = chemically synthesized
  source 1..20: mol_type = other DNA
ggtgtttactgttaaagtga

SEQ ID NO: 50138 - DNA, 20 bp, synthetic construct
  misc_feature 1..20: note = chemically synthesized
  source 1..20: mol_type = other DNA
gttaaagtgagggcattgac

SEQ ID NO: 50139 - DNA, 20 bp, synthetic construct
  misc_feature 1..20: note = chemically synthesized
  source 1..20: mol_type = other DNA
gggcattgactggaaaaaaa

SEQ ID NO: 50140 - DNA, 20 bp, synthetic construct
  misc_feature 1..20: note = chemically synthesized
  source 1..20: mol_type = other DNA
ggcattgactggaaaaaaat

SEQ ID NO: 50141 - DNA, 20 bp, synthetic construct
  misc_feature 1..20: note = chemically synthesized
  source 1..20: mol_type = other DNA
actggaaaaaaatgggaccc

SEQ ID NO: 50142 - DNA, 20 bp, synthetic construct
  misc_feature 1..20: note = chemically synthesized
  source 1..20: mol_type = other DNA
aaaaatgggaccctggaact

SEQ ID NO: 50143 - DNA, 20 bp, synthetic construct
  misc_feature 1..20: note = chemically synthesized
  source 1..20: mol_type = other DNA
aaatgggaccctggaacttg

SEQ ID NO: 50144 - DNA, 20 bp, synthetic construct
  misc_feature 1..20: note = chemically synthesized
  source 1..20: mol_type = other DNA
tgggaccctggaacttggag

SEQ ID NO: 50145 - DNA, 20 bp, synthetic construct
  misc_feature 1..20: note = chemically synthesized
  source 1..20: mol_type = other DNA
gggaccctggaacttggagt

SEQ ID NO: 50146 - DNA, 20 bp, synthetic construct
  misc_feature 1..20: note = chemically synthesized
  source 1..20: mol_type = other DNA
ggaccctggaacttggagtg

SEQ ID NO: 50147 - DNA, 20 bp, synthetic construct
  misc_feature 1..20: note = chemically synthesized
  source 1..20: mol_type = other DNA
gaacttggagtggggatgtg

SEQ ID NO: 50148 - DNA, 20 bp, synthetic construct
  misc_feature 1..20: note = chemically synthesized
  source 1..20: mol_type = other DNA
aacttggagtggggatgtgt

SEQ ID NO: 50149 - DNA, 20 bp, synthetic construct
  misc_feature 1..20: note = chemically synthesized
  source 1..20: mol_type = other DNA
cttggagtggggatgtgtgg

SEQ ID NO: 50150 - DNA, 20 bp, synthetic construct
  misc_feature 1..20: note = chemically synthesized
  source 1..20: mol_type = other DNA
tgtgtgggagaaccctgatg

SEQ ID NO: 50151 - DNA, 20 bp, synthetic construct
  misc_feature 1..20: note = chemically synthesized
  source 1..20: mol_type = other DNA
gggagaaccctgatgaagct

SEQ ID NO: 50152 - DNA, 20 bp, synthetic construct
  misc_feature 1..20: note = chemically synthesized
  source 1..20: mol_type = other DNA
ggagaaccctgatgaagctg

SEQ ID NO: 50153 - DNA, 20 bp, synthetic construct
  misc_feature 1..20: note = chemically synthesized
  source 1..20: mol_type = other DNA
ctgatgaagctgaggacact

SEQ ID NO: 50154 - DNA, 20 bp, synthetic construct
  misc_feature 1..20: note = chemically synthesized
  source 1..20: mol_type = other DNA
ctctgatgaaacttttttgc

SEQ ID NO: 50155 - DNA, 20 bp, synthetic construct
  misc_feature 1..20: note = chemically synthesized
  source 1..20: mol_type = other DNA
tgatgaaacttttttgccag

SEQ ID NO: 50156 - DNA, 20 bp, synthetic construct
  misc_feature 1..20: note = chemically synthesized
  source 1..20: mol_type = other DNA
aacttttttgccagaagaaa

SEQ ID NO: 50157 - DNA, 20 bp, synthetic construct
  misc_feature 1..20: note = chemically synthesized
  source 1..20: mol_type = other DNA
agaaacagtttccccatccc

SEQ ID NO: 50158 - DNA, 20 bp, synthetic construct
  misc_feature 1..20: note = chemically synthesized
  source 1..20: mol_type = other DNA
aacagtttccccatccccag

SEQ ID NO: 50159 - DNA, 20 bp, synthetic construct
  misc_feature 1..20: note = chemically synthesized
  source 1..20: mol_type = other DNA
agtttccccatccccagtag

SEQ ID NO: 50160 - DNA, 20 bp, synthetic construct
  misc_feature 1..20: note = chemically synthesized
  source 1..20: mol_type = other DNA
tccctgacccgtgctgccat

SEQ ID NO: 50161 - DNA, 20 bp, synthetic construct
  misc_feature 1..20: note = chemically synthesized
  source 1..20: mol_type = other DNA
tagcctttccacctttgtct

SEQ ID NO: 50162 - DNA, 20 bp, synthetic construct
  misc_feature 1..20: note = chemically synthesized
  source 1..20: mol_type = other DNA
agcctttccacctttgtctg

SEQ ID NO: 50163 - DNA, 20 bp, synthetic construct
  misc_feature 1..20: note = chemically synthesized
  source 1..20: mol_type = other DNA
atgtaaaccctgcactgctt

SEQ ID NO: 50164 - DNA, 20 bp, synthetic construct
  misc_feature 1..20: note = chemically synthesized
  source 1..20: mol_type = other DNA
tgtaaaccctgcactgcttg

SEQ ID NO: 50165 - DNA, 20 bp, synthetic construct
  misc_feature 1..20: note = chemically synthesized
  source 1..20: mol_type = other DNA
ccctgcactgcttgaggcaa

SEQ ID NO: 50166 - DNA, 20 bp, synthetic construct
  misc_feature 1..20: note = chemically synthesized
  source 1..20: mol_type = other DNA
actgcttgaggcaacagtga

SEQ ID NO: 50167 - DNA, 20 bp, synthetic construct
  misc_feature 1..20: note = chemically synthesized
  source 1..20: mol_type = other DNA
caacagtgatggccttccct

SEQ ID NO: 50168 - DNA, 20 bp, synthetic construct
  misc_feature 1..20: note = chemically synthesized
  source 1..20: mol_type = other DNA
aacagtgatggccttccctg

SEQ ID NO: 50169 - DNA, 20 bp, synthetic construct
  misc_feature 1..20: note = chemically synthesized
  source 1..20: mol_type = other DNA
agtgatggccttccctgagg

SEQ ID NO: 50170 - DNA, 20 bp, synthetic construct
  misc_feature 1..20: note = chemically synthesized
  source 1..20: mol_type = other DNA
gccttccctgaggcagctgc

SEQ ID NO: 50171 - DNA, 20 bp, synthetic construct
  misc_feature 1..20: note = chemically synthesized
  source 1..20: mol_type = other DNA
ccttccctgaggcagctgcc

SEQ ID NO: 50172 - DNA, 20 bp, synthetic construct
  misc_feature 1..20: note = chemically synthesized
  source 1..20: mol_type = other DNA
ccctgaggcagctgccaggc

SEQ ID NO: 50173 - DNA, 20 bp, synthetic construct
  misc_feature 1..20: note = chemically synthesized
  source 1..20: mol_type = other DNA
agataatgttgattctcctc

SEQ ID NO: 50174 - DNA, 20 bp, synthetic construct
  misc_feature 1..20: note = chemically synthesized
  source 1..20: mol_type = other DNA
ataatgttgattctcctcaa

SEQ ID NO: 50175 - DNA, 20 bp, synthetic construct
  misc_feature 1..20: note = chemically synthesized
  source 1..20: mol_type = other DNA
taatgttgattctcctcaag

SEQ ID NO: 50176 - DNA, 20 bp, synthetic construct
  misc_feature 1..20: note = chemically synthesized
  source 1..20: mol_type = other DNA
ctaatgcccctgaatgcttc

SEQ ID NO: 50177 - DNA, 20 bp, synthetic construct
  misc_feature 1..20: note = chemically synthesized
  source 1..20: mol_type = other DNA
aatgcttctagacctataac

SEQ ID NO: 50178 - DNA, 20 bp, synthetic construct
  misc_feature 1..20: note = chemically synthesized
  source 1..20: mol_type = other DNA
atgcttctagacctataact

SEQ ID NO: 50179 - DNA, 20 bp, synthetic construct
  misc_feature 1..20: note = chemically synthesized
  source 1..20: mol_type = other DNA
taactaggctaaattccttg

SEQ ID NO: 50180 - DNA, 20 bp, synthetic construct
  misc_feature 1..20: note = chemically synthesized
  source 1..20: mol_type = other DNA
aactaggctaaattccttgc

SEQ ID NO: 50181 - DNA, 20 bp, synthetic construct
  misc_feature 1..20: note = chemically synthesized
  source 1..20: mol_type = other DNA
gctaaattccttgcgggccc

SEQ ID NO: 50182 - DNA, 20 bp, synthetic construct
  misc_feature 1..20: note = chemically synthesized
  source 1..20: mol_type = other DNA
taaattccttgcgggcccca

SEQ ID NO: 50183 - DNA, 20 bp, synthetic construct
  misc_feature 1..20: note = chemically synthesized
  source 1..20: mol_type = other DNA
aaattccttgcgggccccag

SEQ ID NO: 50184 - DNA, 20 bp, synthetic construct
  misc_feature 1..20: note = chemically synthesized
  source 1..20: mol_type = other DNA
tccttgcgggccccagaggt

SEQ ID NO: 50185 - DNA, 20 bp, synthetic construct
  misc_feature 1..20: note = chemically synthesized
  source 1..20: mol_type = other DNA
ccttgcgggccccagaggtg

SEQ ID NO: 50186 - DNA, 20 bp, synthetic construct
  misc_feature 1..20: note = chemically synthesized
  source 1..20: mol_type = other DNA
cgggccccagaggtgaggtt

SEQ ID NO: 50187 - DNA, 20 bp, synthetic construct
  misc_feature 1..20: note = chemically synthesized
  source 1..20: mol_type = other DNA
ggccccagaggtgaggttca

SEQ ID NO: 50188 - DNA, 20 bp, synthetic construct
  misc_feature 1..20: note = chemically synthesized
  source 1..20: mol_type = other DNA
aggttcagagtgtgacccat

SEQ ID NO: 50189 - DNA, 20 bp, synthetic construct
  misc_feature 1..20: note = chemically synthesized
  source 1..20: mol_type = other DNA
ggttcagagtgtgacccatg

SEQ ID NO: 50190 - DNA, 20 bp, synthetic construct
  misc_feature 1..20: note = chemically synthesized
  source 1..20: mol_type = other DNA
ttcagagtgtgacccatgag

SEQ ID NO: 50191 - DNA, 20 bp, synthetic construct
  misc_feature 1..20: note = chemically synthesized
  source 1..20: mol_type = other DNA
tcagagtgtgacccatgagg

SEQ ID NO: 50192 - DNA, 20 bp, synthetic construct
  misc_feature 1..20: note = chemically synthesized
  source 1..20: mol_type = other DNA
ggaggtgcattatactctaa

SEQ ID NO: 50193 - DNA, 20 bp, synthetic construct
  misc_feature 1..20: note = chemically synthesized
  source 1..20: mol_type = other DNA
atactctaaaagaactgctt

SEQ ID NO: 50194 - DNA, 20 bp, synthetic construct
  misc_feature 1..20: note = chemically synthesized
  source 1..20: mol_type = other DNA
ttaagctttctaatttatat

SEQ ID NO: 50195 - DNA, 20 bp, synthetic construct
  misc_feature 1..20: note = chemically synthesized
  source 1..20: mol_type = other DNA
agctttctaatttatattgg

SEQ ID NO: 50196 - DNA, 20 bp, synthetic construct
  misc_feature 1..20: note = chemically synthesized
  source 1..20: mol_type = other DNA
aatttatattggcagaaatc

SEQ ID NO: 50197 - DNA, 20 bp, synthetic construct
  misc_feature 1..20: note = chemically synthesized
  source 1..20: mol_type = other DNA
tttatattggcagaaatctg

SEQ ID NO: 50198 - DNA, 20 bp, synthetic construct
  misc_feature 1..20: note = chemically synthesized
  source 1..20: mol_type = other DNA
attggcagaaatctggagaa

SEQ ID NO: 50199 - DNA, 20 bp, synthetic construct
  misc_feature 1..20: note = chemically synthesized
  source 1..20: mol_type = other DNA
ttggcagaaatctggagaac

SEQ ID NO: 50200 - DNA, 20 bp, synthetic construct
  misc_feature 1..20: note = chemically synthesized
  source 1..20: mol_type = other DNA
agaaatctggagaacaggca

SEQ ID NO: 50201 - DNA, 20 bp, synthetic construct
  misc_feature 1..20: note = chemically synthesized
  source 1..20: mol_type = other DNA
gaaatctggagaacaggcat

SEQ ID NO: 50202 - DNA, 20 bp, synthetic construct
  misc_feature 1..20: note = chemically synthesized
  source 1..20: mol_type = other DNA
ctggagaacaggcatgggaa

SEQ ID NO: 50203 - DNA, 20 bp, synthetic construct
  misc_feature 1..20: note = chemically synthesized
  source 1..20: mol_type = other DNA
caggcatgggaatggatatt

SEQ ID NO: 50204 - DNA, 20 bp, synthetic construct
  misc_feature 1..20: note = chemically synthesized
  source 1..20: mol_type = other DNA
aggcatgggaatggatatta

SEQ ID NO: 50205 - DNA, 20 bp, synthetic construct
  misc_feature 1..20: note = chemically synthesized
  source 1..20: mol_type = other DNA
ggcatgggaatggatattaa

SEQ ID NO: 50206 - DNA, 20 bp, synthetic construct
  misc_feature 1..20: note = chemically synthesized
  source 1..20: mol_type = other DNA
tgggaatggatattaagggt

SEQ ID NO: 50207 - DNA, 20 bp, synthetic construct
  misc_feature 1..20: note = chemically synthesized
  source 1..20: mol_type = other DNA
gggaatggatattaagggta

SEQ ID NO: 50208 - DNA, 20 bp, synthetic construct
  misc_feature 1..20: note = chemically synthesized
  source 1..20: mol_type = other DNA
ggaatggatattaagggtaa

SEQ ID NO: 50209 - DNA, 20 bp, synthetic construct
  misc_feature 1..20: note = chemically synthesized
  source 1..20: mol_type = other DNA
atattaagggtaagggataa

SEQ ID NO: 50210 - DNA, 20 bp, synthetic construct
  misc_feature 1..20: note = chemically synthesized
  source 1..20: mol_type = other DNA
ttaagggtaagggataatgg

SEQ ID NO: 50211 - DNA, 20 bp, synthetic construct
  misc_feature 1..20: note = chemically synthesized
  source 1..20: mol_type = other DNA
agggtaagggataatggtgg

SEQ ID NO: 50212 - DNA, 20 bp, synthetic construct
  misc_feature 1..20: note = chemically synthesized
  source 1..20: mol_type = other DNA
gggtaagggataatggtgga

SEQ ID NO: 50213 - DNA, 20 bp, synthetic construct
  misc_feature 1..20: note = chemically synthesized
  source 1..20: mol_type = other DNA
ggtaagggataatggtggaa

SEQ ID NO: 50214 - DNA, 20 bp, synthetic construct
  misc_feature 1..20: note = chemically synthesized
  source 1..20: mol_type = other DNA
ggataatggtggaagggaca

SEQ ID NO: 50215 - DNA, 20 bp, synthetic construct
  misc_feature 1..20: note = chemically synthesized
  source 1..20: mol_type = other DNA
ataatggtggaagggacata

SEQ ID NO: 50216 - DNA, 20 bp, synthetic construct
  misc_feature 1..20: note = chemically synthesized
  source 1..20: mol_type = other DNA
tggtggaagggacatagagt

SEQ ID NO: 50217 - DNA, 20 bp, synthetic construct
  misc_feature 1..20: note = chemically synthesized
  source 1..20: mol_type = other DNA
aagggacatagagttggatc

SEQ ID NO: 50218 - DNA, 20 bp, synthetic construct
  misc_feature 1..20: note = chemically synthesized
  source 1..20: mol_type = other DNA
ttggatcaagctgaatttat

SEQ ID NO: 50219 - DNA, 20 bp, synthetic construct
  misc_feature 1..20: note = chemically synthesized
  source 1..20: mol_type = other DNA
tcaagctgaatttattggtt

SEQ ID NO: 50220 - DNA, 20 bp, synthetic construct
  misc_feature 1..20: note = chemically synthesized
  source 1..20: mol_type = other DNA
tttattggtttggccctact

SEQ ID NO: 50221 - DNA, 20 bp, synthetic construct
  misc_feature 1..20: note = chemically synthesized
  source 1..20: mol_type = other DNA
attggtttggccctactaag

SEQ ID NO: 50222 - DNA, 20 bp, synthetic construct
  misc_feature 1..20: note = chemically synthesized
  source 1..20: mol_type = other DNA
ttggtttggccctactaagt

SEQ ID NO: 50223 - DNA, 20 bp, synthetic construct
  misc_feature 1..20: note = chemically synthesized
  source 1..20: mol_type = other DNA
tggtttggccctactaagta

SEQ ID NO: 50224 - DNA, 20 bp, synthetic construct
  misc_feature 1..20: note = chemically synthesized
  source 1..20: mol_type = other DNA
ggattctgcatttaatgttg

SEQ ID NO: 50225 - DNA, 20 bp, synthetic construct
  misc_feature 1..20: note = chemically synthesized
  source 1..20: mol_type = other DNA
ctgcatttaatgttgcagct

SEQ ID NO: 50226 - DNA, 20 bp, synthetic construct
  misc_feature 1..20: note = chemically synthesized
  source 1..20: mol_type = other DNA
tgcatttaatgttgcagctc

SEQ ID NO: 50227 - DNA, 20 bp, synthetic construct
  misc_feature 1..20: note = chemically synthesized
  source 1..20: mol_type = other DNA
gcatttaatgttgcagctcg

SEQ ID NO: 50228 - DNA, 20 bp, synthetic construct
  misc_feature 1..20: note = chemically synthesized
  source 1..20: mol_type = other DNA
aatgttgcagctcggggact

SEQ ID NO: 50229 - DNA, 20 bp, synthetic construct
  misc_feature 1..20: note = chemically synthesized
  source 1..20: mol_type = other DNA
tgcagctcggggacttagaa

SEQ ID NO: 50230 - DNA, 20 bp, synthetic construct
  misc_feature 1..20: note = chemically synthesized
  source 1..20: mol_type = other DNA
gcagctcggggacttagaaa

SEQ ID NO: 50231 - DNA, 20 bp, synthetic construct
  misc_feature 1..20: note = chemically synthesized
  source 1..20: mol_type = other DNA
ggacttagaaaaggttctga

SEQ ID NO: 50232 - DNA, 20 bp, synthetic construct
  misc_feature 1..20: note = chemically synthesized
  source 1..20: mol_type = other DNA
gacttagaaaaggttctgat

SEQ ID NO: 50233 - DNA, 20 bp, synthetic construct
  misc_feature 1..20: note = chemically synthesized
  source 1..20: mol_type = other DNA
acttagaaaaggttctgata

SEQ ID NO: 50234 - DNA, 20 bp, synthetic construct
  misc_feature 1..20: note = chemically synthesized
  source 1..20: mol_type = other DNA
agaaaaggttctgatagggc

SEQ ID NO: 50235 - DNA, 20 bp, synthetic construct
  misc_feature 1..20: note = chemically synthesized
  source 1..20: mol_type = other DNA
gaaaaggttctgatagggcc

SEQ ID NO: 50236 - DNA, 20 bp, synthetic construct
  misc_feature 1..20: note = chemically synthesized
  source 1..20: mol_type = other DNA
aaaggttctgatagggccgg

SEQ ID NO: 50237 - DNA, 20 bp, synthetic construct
  misc_feature 1..20: note = chemically synthesized
  source 1..20: mol_type = other DNA
ggttctgatagggccgggag

SEQ ID NO: 50238 - DNA, 20 bp, synthetic construct
  misc_feature 1..20: note = chemically synthesized
  source 1..20: mol_type = other DNA
tctgatagggccgggagcag

SEQ ID NO: 50239 - DNA, 20 bp, synthetic construct
  misc_feature 1..20: note = chemically synthesized
  source 1..20: mol_type = other DNA
gtggctcacgcctgtaatcc

SEQ ID NO: 50240 - DNA, 20 bp, synthetic construct
  misc_feature 1..20: note = chemically synthesized
  source 1..20: mol_type = other DNA
cgcctgtaatcccagcacct

SEQ ID NO: 50241 - DNA, 20 bp, synthetic construct
  misc_feature 1..20: note = chemically synthesized
  source 1..20: mol_type = other DNA
gcctgtaatcccagcacctt

SEQ ID NO: 50242 - DNA, 20 bp, synthetic construct
  misc_feature 1..20: note = chemically synthesized
  source 1..20: mol_type = other DNA
ctgtaatcccagcaccttgg

SEQ ID NO: 50243 - DNA, 20 bp, synthetic construct
  misc_feature 1..20: note = chemically synthesized
  source 1..20: mol_type = other DNA
tgtaatcccagcaccttggg

SEQ ID NO: 50244 - DNA, 20 bp, synthetic construct
  misc_feature 1..20: note = chemically synthesized
  source 1..20: mol_type = other DNA
aatcccagcaccttgggagg

SEQ ID NO: 50245 - DNA, 20 bp, synthetic construct
  misc_feature 1..20: note = chemically synthesized
  source 1..20: mol_type = other DNA
atcccagcaccttgggaggc

SEQ ID NO: 50246 - DNA, 20 bp, synthetic construct
  misc_feature 1..20: note = chemically synthesized
  source 1..20: mol_type = other DNA
tcccagcaccttgggaggcg

SEQ ID NO: 50247 - DNA, 20 bp, synthetic construct
  misc_feature 1..20: note = chemically synthesized
  source 1..20: mol_type = other DNA
cccagcaccttgggaggcgg

SEQ ID NO: 50248 - DNA, 20 bp, synthetic construct
  misc_feature 1..20: note = chemically synthesized
  source 1..20: mol_type = other DNA
agcaccttgggaggcggggg

SEQ ID NO: 50249 - DNA, 20 bp, synthetic construct
  misc_feature 1..20: note = chemically synthesized
  source 1..20: mol_type = other DNA
gcaccttgggaggcgggggc

SEQ ID NO: 50250 - DNA, 20 bp, synthetic construct
  misc_feature 1..20: note = chemically synthesized
  source 1..20: mol_type = other DNA
ccttgggaggcgggggcggg

SEQ ID NO: 50251 - DNA, 20 bp, synthetic construct
  misc_feature 1..20: note = chemically synthesized
  source 1..20: mol_type = other DNA
ggcgggggcgggcagatcac

SEQ ID NO: 50252 - DNA, 20 bp, synthetic construct
  misc_feature 1..20: note = chemically synthesized
  source 1..20: mol_type = other DNA
gggcgggcagatcacgagat

SEQ ID NO: 50253 - DNA, 20 bp, synthetic construct
  misc_feature 1..20: note = chemically synthesized
  source 1..20: mol_type = other DNA
ggcgggcagatcacgagatc

SEQ ID NO: 50254 - DNA, 20 bp, synthetic construct
  misc_feature 1..20: note = chemically synthesized
  source 1..20: mol_type = other DNA
cgggcagatcacgagatcag

SEQ ID NO: 50255 - DNA, 20 bp, synthetic construct
  misc_feature 1..20: note = chemically synthesized
  source 1..20: mol_type = other DNA
gatcacgagatcaggagatt

SEQ ID NO: 50256 - DNA, 20 bp, synthetic construct
  misc_feature 1..20: note = chemically synthesized
  source 1..20: mol_type = other DNA
tcaggagattgagacaattc

SEQ ID NO: 50257 - DNA, 20 bp, synthetic construct
  misc_feature 1..20: note = chemically synthesized
  source 1..20: mol_type = other DNA
tgagacaattctggctaaaa

SEQ ID NO: 50258 - DNA, 20 bp, synthetic construct
  misc_feature 1..20: note = chemically synthesized
  source 1..20: mol_type = other DNA
tctgctaaaaatacaaaaat

SEQ ID NO: 50259 - DNA, 20 bp, synthetic construct
  misc_feature 1..20: note = chemically synthesized
  source 1..20: mol_type = other DNA
ctaaaaatacaaaaattagc

SEQ ID NO: 50260 - DNA, 20 bp, synthetic construct
  misc_feature 1..20: note = chemically synthesized
  source 1..20: mol_type = other DNA
taaaaatacaaaaattagct

SEQ ID NO: 50261 - DNA, 20 bp, synthetic construct
  misc_feature 1..20: note = chemically synthesized
  source 1..20: mol_type = other DNA
atacaaaaattagctgggca

SEQ ID NO: 50262 - DNA, 20 bp, synthetic construct
  misc_feature 1..20: note = chemically synthesized
  source 1..20: mol_type = other DNA
taactgtaatctcatctact

SEQ ID NO: 50263 - DNA, 20 bp, synthetic construct
  misc_feature 1..20: note = chemically synthesized
  source 1..20: mol_type = other DNA
aactgtaatctcatctactt

SEQ ID NO: 50264 - DNA, 20 bp, synthetic construct
  misc_feature 1..20: note = chemically synthesized
  source 1..20: mol_type = other DNA
ctgtaatctcatctacttgg

SEQ ID NO: 50265 - DNA, 20 bp, synthetic construct
  misc_feature 1..20: note = chemically synthesized
  source 1..20: mol_type = other DNA
tgtaatctcatctacttggg

SEQ ID NO: 50266 - DNA, 20 bp, synthetic construct
  misc_feature 1..20: note = chemically synthesized
  source 1..20: mol_type = other DNA
tctcatctacttgggaggct

SEQ ID NO: 50267 - DNA, 20 bp, synthetic construct
  misc_feature 1..20: note = chemically synthesized
  source 1..20: mol_type = other DNA
ctcatctacttgggaggctg

SEQ ID NO: 50268 - DNA, 20 bp, synthetic construct
  misc_feature 1..20: note = chemically synthesized
  source 1..20: mol_type = other DNA
tctacttgggaggctgaggc

SEQ ID NO: 50269 - DNA, 20 bp, synthetic construct
  misc_feature 1..20: note = chemically synthesized
  source 1..20: mol_type = other DNA
tacttgggaggctgaggcaa

SEQ ID NO: 50270 - DNA, 20 bp, synthetic construct
  misc_feature 1..20: note = chemically synthesized
  source 1..20: mol_type = other DNA
agagaactgcttgaacctgt

SEQ ID NO: 50271 - DNA, 20 bp, synthetic construct
  misc_feature 1..20: note = chemically synthesized
  source 1..20: mol_type = other DNA
gagaactgcttgaacctgtg

SEQ ID NO: 50272 - DNA, 20 bp, synthetic construct
  misc_feature 1..20: note = chemically synthesized
  source 1..20: mol_type = other DNA
aactgcttgaacctgtgagg

SEQ ID NO: 50273 - DNA, 20 bp, synthetic construct
  misc_feature 1..20: note = chemically synthesized
  source 1..20: mol_type = other DNA
ctgcttgaacctgtgaggca

SEQ ID NO: 50274 - DNA, 20 bp, synthetic construct
  misc_feature 1..20: note = chemically synthesized
  source 1..20: mol_type = other DNA
aacctgtgaggcagagattg

SEQ ID NO: 50275 - DNA, 20 bp, synthetic construct
  misc_feature 1..20: note = chemically synthesized
  source 1..20: mol_type = other DNA
tgtgaggcagagattgcagt

SEQ ID NO: 50276 - DNA, 20 bp, synthetic construct
  misc_feature 1..20: note = chemically synthesized
  source 1..20: mol_type = other DNA
ggcagagattgcagtgagcc

SEQ ID NO: 50277 - DNA, 20 bp, synthetic construct
  misc_feature 1..20: note = chemically synthesized
  source 1..20: mol_type = other DNA
aagatcgccccactgcattc

SEQ ID NO: 50278 - DNA, 20 bp, synthetic construct
  misc_feature 1..20: note = chemically synthesized
  source 1..20: mol_type = other DNA
cgccccactgcattccagcc

SEQ ID NO: 50279 - DNA, 20 bp, synthetic construct
  misc_feature 1..20: note = chemically synthesized
  source 1..20: mol_type = other DNA
actgcattccagcctggtaa

SEQ ID NO: 50280 - DNA, 20 bp, synthetic construct
  misc_feature 1..20: note = chemically synthesized
  source 1..20: mol_type = other DNA
tgcattccagcctggtaaca

SEQ ID NO: 50281 - DNA, 20 bp, synthetic construct
  misc_feature 1..20: note = chemically synthesized
  source 1..20: mol_type = other DNA
ttccagcctggtaacagagc

SEQ ID NO: 50282 - DNA, 20 bp, synthetic construct
  misc_feature 1..20: note = chemically synthesized
  source 1..20: mol_type = other DNA
ttccaaaaaaaaaaaaaaaa

SEQ ID NO: 50283 - DNA, 20 bp, synthetic construct
  misc_feature 1..20: note = chemically synthesized
  source 1..20: mol_type = other DNA
aaaaaaaaaaaaagttataa

SEQ ID NO: 50284 - DNA, 20 bp, synthetic construct
  misc_feature 1..20: note = chemically synthesized
  source 1..20: mol_type = other DNA
gttataatagtttatttgct

SEQ ID NO: 50285 - DNA, 20 bp, synthetic construct
  misc_feature 1..20: note = chemically synthesized
  source 1..20: mol_type = other DNA
taatagtttatttgcttggt

SEQ ID NO: 50286 - DNA, 20 bp, synthetic construct
  misc_feature 1..20: note = chemically synthesized
  source 1..20: mol_type = other DNA
ttgcttggttagctgaaata

SEQ ID NO: 50287 - DNA, 20 bp, synthetic construct
  misc_feature 1..20: note = chemically synthesized
  source 1..20: mol_type = other DNA
ttagctgaaatatggattaa

SEQ ID NO: 50288 - DNA, 20 bp, synthetic construct
  misc_feature 1..20: note = chemically synthesized
  source 1..20: mol_type = other DNA
ctgaaatatggattaaaaga

SEQ ID NO: 50289 - DNA, 20 bp, synthetic construct
  misc_feature 1..20: note = chemically synthesized
  source 1..20: mol_type = other DNA
attaaaagatggtccaatgt

SEQ ID NO: 50290 - DNA, 20 bp, synthetic construct
  misc_feature 1..20: note = chemically synthesized
  source 1..20: mol_type = other DNA
aaagatggtccaatgttagt

SEQ ID NO: 50291 - DNA, 20 bp, synthetic construct
  misc_feature 1..20: note = chemically synthesized
  source 1..20: mol_type = other DNA
atggtccaatgttagtgagc

SEQ ID NO: 50292 - DNA, 20 bp, synthetic construct
  misc_feature 1..20: note = chemically synthesized
  source 1..20: mol_type = other DNA
ttagtgagctggaaatgcct

SEQ ID NO: 50293 - DNA, 20 bp, synthetic construct
  misc_feature 1..20: note = chemically synthesized
  source 1..20: mol_type = other DNA
ggaaatgccttggtttaatg

SEQ ID NO: 50294 - DNA, 20 bp, synthetic construct
  misc_feature 1..20: note = chemically synthesized
  source 1..20: mol_type = other DNA
aaatgccttggtttaatgta

SEQ ID NO: 50295 - DNA, 20 bp, synthetic construct
  misc_feature 1..20: note = chemically synthesized
  source 1..20: mol_type = other DNA
aatgccttggtttaatgtag

SEQ ID NO: 50296 - DNA, 20 bp, synthetic construct
  misc_feature 1..20: note = chemically synthesized
  source 1..20: mol_type = other DNA
gccttggtttaatgtagagg

SEQ ID NO: 50297 - DNA, 20 bp, synthetic construct
  misc_feature 1..20: note = chemically synthesized
  source 1..20: mol_type = other DNA
aatgtagaggaagtgatcca

SEQ ID NO: 50298 - DNA, 20 bp, synthetic construct
  misc_feature 1..20: note = chemically synthesized
  source 1..20: mol_type = other DNA
atgtagaggaagtgatccaa

SEQ ID NO: 50299 - DNA, 20 bp, synthetic construct
  misc_feature 1..20: note = chemically synthesized
  source 1..20: mol_type = other DNA
gaggaagtgatccaaaggct

SEQ ID NO: 50300 - DNA, 20 bp, synthetic construct
  misc_feature 1..20: note = chemically synthesized
  source 1..20: mol_type = other DNA
aggaagtgatccaaaggctt

SEQ ID NO: 50301 - DNA, 20 bp, synthetic construct
  misc_feature 1..20: note = chemically synthesized
  source 1..20: mol_type = other DNA
ggaagtgatccaaaggctta

SEQ ID NO: 50302 - DNA, 20 bp, synthetic construct
  misc_feature 1..20: note = chemically synthesized
  source 1..20: mol_type = other DNA
aagtgatccaaaggcttagg

SEQ ID NO: 50303 - DNA, 20 bp, synthetic construct
  misc_feature 1..20: note = chemically synthesized
  source 1..20: mol_type = other DNA
atccaaaggcttagggagat

SEQ ID NO: 50304 - DNA, 20 bp, synthetic construct
  misc_feature 1..20: note = chemically synthesized
  source 1..20: mol_type = other DNA
tccaaaggcttagggagatt

SEQ ID NO: 50305 - DNA, 20 bp, synthetic construct
  misc_feature 1..20: note = chemically synthesized
  source 1..20: mol_type = other DNA
aaggcttagggagattagga

SEQ ID NO: 50306 - DNA, 20 bp, synthetic construct
  misc_feature 1..20: note = chemically synthesized
  source 1..20: mol_type = other DNA
gcttagggagattaggatgg

SEQ ID NO: 50307 - DNA, 20 bp, synthetic construct
  misc_feature 1..20: note = chemically synthesized
  source 1..20: mol_type = other DNA
ttagggagattaggatggtg

SEQ ID NO: 50308 - DNA, 20 bp, synthetic construct
  misc_feature 1..20: note = chemically synthesized
  source 1..20: mol_type = other DNA
gggagattaggatggtggag

SEQ ID NO: 50309 - DNA, 20 bp, synthetic construct
  misc_feature 1..20: note = chemically synthesized
  source 1..20: mol_type = other DNA
attaggatggtggagtggat

SEQ ID NO: 50310 - DNA, 20 bp, synthetic construct
  misc_feature 1..20: note = chemically synthesized
  source 1..20: mol_type = other DNA
gtggagtggattagtcactt

SEQ ID NO: 50311 - DNA, 20 bp, synthetic construct
  misc_feature 1..20: note = chemically synthesized
  source 1..20: mol_type = other DNA
cactttagacctactcatcc

SEQ ID NO: 50312 - DNA, 20 bp, synthetic construct
  misc_feature 1..20: note = chemically synthesized
  source 1..20: mol_type = other DNA
ttagacctactcatcccagc

SEQ ID NO: 50313 - DNA, 20 bp, synthetic construct
  misc_feature 1..20: note = chemically synthesized
  source 1..20: mol_type = other DNA
tagacctactcatcccagct

SEQ ID NO: 50314 - DNA, 20 bp, synthetic construct
  misc_feature 1..20: note = chemically synthesized
  source 1..20: mol_type = other DNA
gacctactcatcccagctgg

SEQ ID NO: 50315 - DNA, 20 bp, synthetic construct
  misc_feature 1..20: note = chemically synthesized
  source 1..20: mol_type = other DNA
acctactcatcccagctggg

SEQ ID NO: 50316 - DNA, 20 bp, synthetic construct
  misc_feature 1..20: note = chemically synthesized
  source 1..20: mol_type = other DNA
cctactcatcccagctggga

SEQ ID NO: 50317 - DNA, 20 bp, synthetic construct
  misc_feature 1..20: note = chemically synthesized
  source 1..20: mol_type = other DNA
tcatcccagctgggagggtc

SEQ ID NO: 50318 - DNA, 20 bp, synthetic construct
  misc_feature 1..20: note = chemically synthesized
  source 1..20: mol_type = other DNA
tcccagctgggagggtccag

SEQ ID NO: 50319 - DNA, 20 bp, synthetic construct
  misc_feature 1..20: note = chemically synthesized
  source 1..20: mol_type = other DNA
gggtccagaagatacaccct

SEQ ID NO: 50320 - DNA, 20 bp, synthetic construct
  misc_feature 1..20: note = chemically synthesized
  source 1..20: mol_type = other DNA
agaagatacacccttggccg

SEQ ID NO: 50321 - DNA, 20 bp, synthetic construct
  misc_feature 1..20: note = chemically synthesized
  source 1..20: mol_type = other DNA
ttggccgaagctttgtgaaa

SEQ ID NO: 50322 - DNA, 20 bp, synthetic construct
  misc_feature 1..20: note = chemically synthesized
  source 1..20: mol_type = other DNA
gctttgtgaaatagatttgt

SEQ ID NO: 50323 - DNA, 20 bp, synthetic construct
  misc_feature 1..20: note = chemically synthesized
  source 1..20: mol_type = other DNA
tttgtgaaatagatttgtga

SEQ ID NO: 50324 - DNA, 20 bp, synthetic construct
  misc_feature 1..20: note = chemically synthesized
  source 1..20: mol_type = other DNA
gtgaaatagatttgtgagag

SEQ ID NO: 50325 - DNA, 20 bp, synthetic construct
  misc_feature 1..20: note = chemically synthesized
  source 1..20: mol_type = other DNA
gagcagcacctgtatttttg

SEQ ID NO: 50326 - DNA, 20 bp, synthetic construct
  misc_feature 1..20: note = chemically synthesized
  source 1..20: mol_type = other DNA
gcagcacctgtatttttgaa

SEQ ID NO: 50327 - DNA, 20 bp, synthetic construct
  misc_feature 1..20: note = chemically synthesized
  source 1..20: mol_type = other DNA
aattgctcttctctgtatgt

SEQ ID NO: 50328 - DNA, 20 bp, synthetic construct
  misc_feature 1..20: note = chemically synthesized
  source 1..20: mol_type = other DNA
tctctgtatgtcagatctaa

SEQ ID NO: 50329 - DNA, 20 bp, synthetic construct
  misc_feature 1..20: note = chemically synthesized
  source 1..20: mol_type = other DNA
ctgtatgtcagatctaacag

SEQ ID NO: 50330 - DNA, 20 bp, synthetic construct
  misc_feature 1..20: note = chemically synthesized
  source 1..20: mol_type = other DNA
tgtatgtcagatctaacagt

SEQ ID NO: 50331 - DNA, 20 bp, synthetic construct
  misc_feature 1..20: note = chemically synthesized
  source 1..20: mol_type = other DNA
agatctaacagtaggaacca

SEQ ID NO: 50332 - DNA, 20 bp, synthetic construct
  misc_feature 1..20: note = chemically synthesized
  source 1..20: mol_type = other DNA
actacaaaatttaaatacaa

SEQ ID NO: 50333 - DNA, 20 bp, synthetic construct
  misc_feature 1..20: note = chemically synthesized
  source 1..20: mol_type = other DNA
ctacaaaatttaaatacaat

SEQ ID NO: 50334 - DNA, 20 bp, synthetic construct
  misc_feature 1..20: note = chemically synthesized
  source 1..20: mol_type = other DNA
ttaaatacaatgggaataat

SEQ ID NO: 50335 - DNA, 20 bp, synthetic construct
  misc_feature 1..20: note = chemically synthesized
  source 1..20: mol_type = other DNA
aatgggaataattggatcct

SEQ ID NO: 50336 - DNA, 20 bp, synthetic construct
  misc_feature 1..20: note = chemically synthesized
  source 1..20: mol_type = other DNA
atgggaataattggatcctg

SEQ ID NO: 50337 - DNA, 20 bp, synthetic construct
  misc_feature 1..20: note = chemically synthesized
  source 1..20: mol_type = other DNA
ggaataattggatcctgagg

SEQ ID NO: 50338 - DNA, 20 bp, synthetic construct
  misc_feature 1..20: note = chemically synthesized
  source 1..20: mol_type = other DNA
ataattggatcctgaggtgg

SEQ ID NO: 50339 - DNA, 20 bp, synthetic construct
  misc_feature 1..20: note = chemically synthesized
  source 1..20: mol_type = other DNA
taattggatcctgaggtggc

SEQ ID NO: 50340 - DNA, 20 bp, synthetic construct
  misc_feature 1..20: note = chemically synthesized
  source 1..20: mol_type = other DNA
aattggatcctgaggtggca

SEQ ID NO: 50341 - DNA, 20 bp, synthetic construct
  misc_feature 1..20: note = chemically synthesized
  source 1..20: mol_type = other DNA
attggatcctgaggtggcag

SEQ ID NO: 50342 - DNA, 20 bp, synthetic construct
  misc_feature 1..20: note = chemically synthesized
  source 1..20: mol_type = other DNA
atcctgaggtggcaggggcc

SEQ ID NO: 50343 - DNA, 20 bp, synthetic construct
  misc_feature 1..20: note = chemically synthesized
  source 1..20: mol_type = other DNA
aggtggcaggggccaagtgt

SEQ ID NO: 50344 - DNA, 20 bp, synthetic construct
  misc_feature 1..20: note = chemically synthesized
  source 1..20: mol_type = other DNA
gtgttggcactgaaccatca

SEQ ID NO: 50345 - DNA, 20 bp, synthetic construct
  misc_feature 1..20: note = chemically synthesized
  source 1..20: mol_type = other DNA
tgttggcactgaaccatcaa

SEQ ID NO: 50346 - DNA, 20 bp, synthetic construct
  misc_feature 1..20: note = chemically synthesized
  source 1..20: mol_type = other DNA
ggcactgaaccatcaaaggc

SEQ ID NO: 50347 - DNA, 20 bp, synthetic construct
  misc_feature 1..20: note = chemically synthesized
  source 1..20: mol_type = other DNA
gcactgaaccatcaaaggca

SEQ ID NO: 50348 - DNA, 20 bp, synthetic construct
  misc_feature 1..20: note = chemically synthesized
  source 1..20: mol_type = other DNA
ctgaaccatcaaaggcaagg

SEQ ID NO: 50349 - DNA, 20 bp, synthetic construct
  misc_feature 1..20: note = chemically synthesized
  source 1..20: mol_type = other DNA
tgaaccatcaaaggcaaggt

SEQ ID NO: 50350 - DNA, 20 bp, synthetic construct
  misc_feature 1..20: note = chemically synthesized
  source 1..20: mol_type = other DNA
ggtgggcataactaccataa

SEQ ID NO: 50351 - DNA, 20 bp, synthetic construct
  misc_feature 1..20: note = chemically synthesized
  source 1..20: mol_type = other DNA
ggcataactaccataataga

SEQ ID NO: 50352 - DNA, 20 bp, synthetic construct
  misc_feature 1..20: note = chemically synthesized
  source 1..20: mol_type = other DNA
ataactaccataatagacag

SEQ ID NO: 50353 - DNA, 20 bp, synthetic construct
  misc_feature 1..20: note = chemically synthesized
  source 1..20: mol_type = other DNA
aactaccataatagacagca

SEQ ID NO: 50354 - DNA, 20 bp, synthetic construct
  misc_feature 1..20: note = chemically synthesized
  source 1..20: mol_type = other DNA
actaccataatagacagcag

SEQ ID NO: 50355 - DNA, 20 bp, synthetic construct
  misc_feature 1..20: note = chemically synthesized
  source 1..20: mol_type = other DNA
cataatagacagcagaggca

SEQ ID NO: 50356 - DNA, 20 bp, synthetic construct
  misc_feature 1..20: note = chemically synthesized
  source 1..20: mol_type = other DNA
aatagacagcagaggcaaag

SEQ ID NO: 50357 - DNA, 20 bp, synthetic construct
  misc_feature 1..20: note = chemically synthesized
  source 1..20: mol_type = other DNA
agcagaggcaaagcagccat

SEQ ID NO: 50358 - DNA, 20 bp, synthetic construct
  misc_feature 1..20: note = chemically synthesized
  source 1..20: mol_type = other DNA
aggcaaagcagccatcagaa

SEQ ID NO: 50359 - DNA, 20 bp, synthetic construct
  misc_feature 1..20: note = chemically synthesized
  source 1..20: mol_type = other DNA
tcagaatagtctgactcatg

SEQ ID NO: 50360 - DNA, 20 bp, synthetic construct
  misc_feature 1..20: note = chemically synthesized
  source 1..20: mol_type = other DNA
agaatagtctgactcatgta

SEQ ID NO: 50361 - DNA, 20 bp, synthetic construct
  misc_feature 1..20: note = chemically synthesized
  source 1..20: mol_type = other DNA
gtctgactcatgtagagctc

SEQ ID NO: 50362 - DNA, 20 bp, synthetic construct
  misc_feature 1..20: note = chemically synthesized
  source 1..20: mol_type = other DNA
ctcatgtagagctctggcat

SEQ ID NO: 50363 - DNA, 20 bp, synthetic construct
  misc_feature 1..20: note = chemically synthesized
  source 1..20: mol_type = other DNA
tggcattggctaattaatca

SEQ ID NO: 50364 - DNA, 20 bp, synthetic construct
  misc_feature 1..20: note = chemically synthesized
  source 1..20: mol_type = other DNA
ctaattaatcatggtgttcc

SEQ ID NO: 50365 - DNA, 20 bp, synthetic construct
  misc_feature 1..20: note = chemically synthesized
  source 1..20: mol_type = other DNA
attaatcatggtgttcctag

SEQ ID NO: 50366 - DNA, 20 bp, synthetic construct
  misc_feature 1..20: note = chemically synthesized
  source 1..20: mol_type = other DNA
gttcctagaagtgaaattga

SEQ ID NO: 50367 - DNA, 20 bp, synthetic construct
  misc_feature 1..20: note = chemically synthesized
  source 1..20: mol_type = other DNA
ttcctagaagtgaaattgat

SEQ ID NO: 50368 - DNA, 20 bp, synthetic construct
  misc_feature 1..20: note = chemically synthesized
  source 1..20: mol_type = other DNA
ttatataaacaaaaaactgc

SEQ ID NO: 50369 - DNA, 20 bp, synthetic construct
  misc_feature 1..20: note = chemically synthesized
  source 1..20: mol_type = other DNA
tatataaacaaaaaactgcc

SEQ ID NO: 50370 - DNA, 20 bp, synthetic construct
  misc_feature 1..20: note = chemically synthesized
  source 1..20: mol_type = other DNA
ataaacaaaaaactgccagg

SEQ ID NO: 50371 - DNA, 20 bp, synthetic construct
  misc_feature 1..20: note = chemically synthesized
  source 1..20: mol_type = other DNA
caaaaaactgccaggtagaa

SEQ ID NO: 50372 - DNA, 20 bp, synthetic construct
  misc_feature 1..20: note = chemically synthesized
  source 1..20: mol_type = other DNA
ctgccaggtagaatggacta

SEQ ID NO: 50373 - DNA, 20 bp, synthetic construct
  misc_feature 1..20: note = chemically synthesized
  source 1..20: mol_type = other DNA
actaatctgaattataaaaa

SEQ ID NO: 50374 - DNA, 20 bp, synthetic construct
  misc_feature 1..20: note = chemically synthesized
  source 1..20: mol_type = other DNA
taatctgaattataaaaaca

SEQ ID NO: 50375 - DNA, 20 bp, synthetic construct
  misc_feature 1..20: note = chemically synthesized
  source 1..20: mol_type = other DNA
attataaaaacagagaatca

SEQ ID NO: 50376 - DNA, 20 bp, synthetic construct
  misc_feature 1..20: note = chemically synthesized
  source 1..20: mol_type = other DNA
ttataaaaacagagaatcat

SEQ ID NO: 50377 - DNA, 20 bp, synthetic construct
  misc_feature 1..20: note = chemically synthesized
  source 1..20: mol_type = other DNA
atgggccctcaatcaatttc

SEQ ID NO: 50378 - DNA, 20 bp, synthetic construct
  misc_feature 1..20: note = chemically synthesized
  source 1..20: mol_type = other DNA
ttccagactcgaacctgtta

SEQ ID NO: 50379 - DNA, 20 bp, synthetic construct
  misc_feature 1..20: note = chemically synthesized
  source 1..20: mol_type = other DNA
actcgaacctgttacagttc

SEQ ID NO: 50380 - DNA, 20 bp, synthetic construct
  misc_feature 1..20: note = chemically synthesized
  source 1..20: mol_type = other DNA
gttccagaacccactgaatg

SEQ ID NO: 50381 - DNA, 20 bp, synthetic construct
  misc_feature 1..20: note = chemically synthesized
  source 1..20: mol_type = other DNA
ttccagaacccactgaatga

SEQ ID NO: 50382 - DNA, 20 bp, synthetic construct
  misc_feature 1..20: note = chemically synthesized
  source 1..20: mol_type = other DNA
tccagaacccactgaatgaa

SEQ ID NO: 50383 - DNA, 20 bp, synthetic construct
  misc_feature 1..20: note = chemically synthesized
  source 1..20: mol_type = other DNA
ccagaacccactgaatgaag

SEQ ID NO: 50384 - DNA, 20 bp, synthetic construct
  misc_feature 1..20: note = chemically synthesized
  source 1..20: mol_type = other DNA
agaacccactgaatgaaggg

SEQ ID NO: 50385 - DNA, 20 bp, synthetic construct
  misc_feature 1..20: note = chemically synthesized
  source 1..20: mol_type = other DNA
gaacccactgaatgaagggg

SEQ ID NO: 50386 - DNA, 20 bp, synthetic construct
  misc_feature 1..20: note = chemically synthesized
  source 1..20: mol_type = other DNA
ccactgaatgaaggggaggc

SEQ ID NO: 50387 - DNA, 20 bp, synthetic construct
  misc_feature 1..20: note = chemically synthesized
  source 1..20: mol_type = other DNA
aggggaggctggatcccctt

SEQ ID NO: 50388 - DNA, 20 bp, synthetic construct
  misc_feature 1..20: note = chemically synthesized
  source 1..20: mol_type = other DNA
ggggaggctggatccccttg

SEQ ID NO: 50389 - DNA, 20 bp, synthetic construct
  misc_feature 1..20: note = chemically synthesized
  source 1..20: mol_type = other DNA
gaggctggatccccttgagg

SEQ ID NO: 50390 - DNA, 20 bp, synthetic construct
  misc_feature 1..20: note = chemically synthesized
  source 1..20: mol_type = other DNA
aggctggatccccttgagga

SEQ ID NO: 50391 - DNA, 20 bp, synthetic construct
  misc_feature 1..20: note = chemically synthesized
  source 1..20: mol_type = other DNA
cccttgaggaaggacaccac

SEQ ID NO: 50392 - DNA, 20 bp, synthetic construct
  misc_feature 1..20: note = chemically synthesized
  source 1..20: mol_type = other DNA
ccttgaggaaggacaccact

SEQ ID NO: 50393 - DNA, 20 bp, synthetic construct
  misc_feature 1..20: note = chemically synthesized
  source 1..20: mol_type = other DNA
tctttctcccatccttccct

SEQ ID NO: 50394 - DNA, 20 bp, synthetic construct
  misc_feature 1..20: note = chemically synthesized
  source 1..20: mol_type = other DNA
ctttctcccatccttcccta

SEQ ID NO: 50395 - DNA, 20 bp, synthetic construct
  misc_feature 1..20: note = chemically synthesized
  source 1..20: mol_type = other DNA
ttctcccatccttccctaag

SEQ ID NO: 50396 - DNA, 20 bp, synthetic construct
  misc_feature 1..20: note = chemically synthesized
  source 1..20: mol_type = other DNA
tccttccctaaggagacctc

SEQ ID NO: 50397 - DNA, 20 bp, synthetic construct
  misc_feature 1..20: note = chemically synthesized
  source 1..20: mol_type = other DNA
ggagacctctggccttttac

SEQ ID NO: 50398 - DNA, 20 bp, synthetic construct
  misc_feature 1..20: note = chemically synthesized
  source 1..20: mol_type = other DNA
gagacctctggccttttacc

SEQ ID NO: 50399 - DNA, 20 bp, synthetic construct
  misc_feature 1..20: note = chemically synthesized
  source 1..20: mol_type = other DNA
agacctctggccttttacca

SEQ ID NO: 50400 - DNA, 20 bp, synthetic construct
  misc_feature 1..20: note = chemically synthesized
  source 1..20: mol_type = other DNA
accagggtaactgtgtgtac

SEQ ID NO: 50401 - DNA, 20 bp, synthetic construct
  misc_feature 1..20: note = chemically synthesized
  source 1..20: mol_type = other DNA
cagggtaactgtgtgtactg

SEQ ID NO: 50402 - DNA, 20 bp, synthetic construct
  misc_feature 1..20: note = chemically synthesized
  source 1..20: mol_type = other DNA
gtaactgtgtgtactggaga

SEQ ID NO: 50403 - DNA, 20 bp, synthetic construct
  misc_feature 1..20: note = chemically synthesized
  source 1..20: mol_type = other DNA
taactgtgtgtactggagaa

SEQ ID NO: 50404 - DNA, 20 bp, synthetic construct
  misc_feature 1..20: note = chemically synthesized
  source 1..20: mol_type = other DNA
aactgtgtgtactggagaaa

SEQ ID NO: 50405 - DNA, 20 bp, synthetic construct
  misc_feature 1..20: note = chemically synthesized
  source 1..20: mol_type = other DNA
tgtgtgtactggagaaaggg

SEQ ID NO: 50406 - DNA, 20 bp, synthetic construct
  misc_feature 1..20: note = chemically synthesized
  source 1..20: mol_type = other DNA
actggagaaagggaagtaat

SEQ ID NO: 50407 - DNA, 20 bp, synthetic construct
  misc_feature 1..20: note = chemically synthesized
  source 1..20: mol_type = other DNA
agggaagtaatgagacattt

SEQ ID NO: 50408 - DNA, 20 bp, synthetic construct
  misc_feature 1..20: note = chemically synthesized
  source 1..20: mol_type = other DNA
aagtaatgagacatttcaga

SEQ ID NO: 50409 - DNA, 20 bp, synthetic construct
  misc_feature 1..20: note = chemically synthesized
  source 1..20: mol_type = other DNA
tgagacatttcagaaagtac

SEQ ID NO: 50410 - DNA, 20 bp, synthetic construct
  misc_feature 1..20: note = chemically synthesized
  source 1..20: mol_type = other DNA
tttcagaaagtactggacac

SEQ ID NO: 50411 - DNA, 20 bp, synthetic construct
  misc_feature 1..20: note = chemically synthesized
  source 1..20: mol_type = other DNA
aagtactggacactggctct

SEQ ID NO: 50412 - DNA, 20 bp, synthetic construct
  misc_feature 1..20: note = chemically synthesized
  source 1..20: mol_type = other DNA
ctctgagctgacgttgattc

SEQ ID NO: 50413 - DNA, 20 bp, synthetic construct
  misc_feature 1..20: note = chemically synthesized
  source 1..20: mol_type = other DNA
tctgagctgacgttgattcc

SEQ ID NO: 50414 - DNA, 20 bp, synthetic construct
  misc_feature 1..20: note = chemically synthesized
  source 1..20: mol_type = other DNA
ctgagctgacgttgattcca

SEQ ID NO: 50415 - DNA, 20 bp, synthetic construct
  misc_feature 1..20: note = chemically synthesized
  source 1..20: mol_type = other DNA
gggtacccaaaacgttattg

SEQ ID NO: 50416 - DNA, 20 bp, synthetic construct
  misc_feature 1..20: note = chemically synthesized
  source 1..20: mol_type = other DNA
aaaacgttattgtggttccc

SEQ ID NO: 50417 - DNA, 20 bp, synthetic construct
  misc_feature 1..20: note = chemically synthesized
  source 1..20: mol_type = other DNA
ttattgtggttccccagtta

SEQ ID NO: 50418 - DNA, 20 bp, synthetic construct
  misc_feature 1..20: note = chemically synthesized
  source 1..20: mol_type = other DNA
ttgtggttccccagttaaag

SEQ ID NO: 50419 - DNA, 20 bp, synthetic construct
  misc_feature 1..20: note = chemically synthesized
  source 1..20: mol_type = other DNA
tgtggttccccagttaaagt

SEQ ID NO: 50420 - DNA, 20 bp, synthetic construct
  misc_feature 1..20: note = chemically synthesized
  source 1..20: mol_type = other DNA
gtggttccccagttaaagta

SEQ ID NO: 50421 - DNA, 20 bp, synthetic construct
  misc_feature 1..20: note = chemically synthesized
  source 1..20: mol_type = other DNA
tggttccccagttaaagtag

SEQ ID NO: 50422 - DNA, 20 bp, synthetic construct
  misc_feature 1..20: note = chemically synthesized
  source 1..20: mol_type = other DNA
ccagttaaagtaggggctta

SEQ ID NO: 50423 - DNA, 20 bp, synthetic construct
  misc_feature 1..20: note = chemically synthesized
  source 1..20: mol_type = other DNA
agttaaagtaggggcttatg

SEQ ID NO: 50424 - DNA, 20 bp, synthetic construct
  misc_feature 1..20: note = chemically synthesized
  source 1..20: mol_type = other DNA
gttaaagtaggggcttatgg

SEQ ID NO: 50425 - DNA, 20 bp, synthetic construct
  misc_feature 1..20: note = chemically synthesized
  source 1..20: mol_type = other DNA
aagtaggggcttatggaggt

SEQ ID NO: 50426 - DNA, 20 bp, synthetic construct
  misc_feature 1..20: note = chemically synthesized
  source 1..20: mol_type = other DNA
agtaggggcttatggaggtt

SEQ ID NO: 50427 - DNA, 20 bp, synthetic construct
  misc_feature 1..20: note = chemically synthesized
  source 1..20: mol_type = other DNA
tatggaggttaggtaattaa

SEQ ID NO: 50428 - DNA, 20 bp, synthetic construct
  misc_feature 1..20: note = chemically synthesized
  source 1..20: mol_type = other DNA
tggaggttaggtaattaatg

SEQ ID NO: 50429 - DNA, 20 bp, synthetic construct
  misc_feature 1..20: note = chemically synthesized
  source 1..20: mol_type = other DNA
ttaggtaattaatggagttt

SEQ ID NO: 50430 - DNA, 20 bp, synthetic construct
  misc_feature 1..20: note = chemically synthesized
  source 1..20: mol_type = other DNA
tttagctcatttctgactta

SEQ ID NO: 50431 - DNA, 20 bp, synthetic construct
  misc_feature 1..20: note = chemically synthesized
  source 1..20: mol_type = other DNA
agctcatttctgacttacag

SEQ ID NO: 50432 - DNA, 20 bp, synthetic construct
  misc_feature 1..20: note = chemically synthesized
  source 1..20: mol_type = other DNA
tttctgacttacagtggttc

SEQ ID NO: 50433 - DNA, 20 bp, synthetic construct
  misc_feature 1..20: note = chemically synthesized
  source 1..20: mol_type = other DNA
ctgacttacagtggttccag

SEQ ID NO: 50434 - DNA, 20 bp, synthetic construct
  misc_feature 1..20: note = chemically synthesized
  source 1..20: mol_type = other DNA
tgacttacagtggttccagt

SEQ ID NO: 50435 - DNA, 20 bp, synthetic construct
  misc_feature 1..20: note = chemically synthesized
  source 1..20: mol_type = other DNA
cagtggttccagtgggtccc

SEQ ID NO: 50436 - DNA, 20 bp, synthetic construct
  misc_feature 1..20: note = chemically synthesized
  source 1..20: mol_type = other DNA
gggtccctggacttatcctc

SEQ ID NO: 50437 - DNA, 20 bp, synthetic construct
  misc_feature 1..20: note = chemically synthesized
  source 1..20: mol_type = other DNA
ttatcctctggtcattttcc

SEQ ID NO: 50438 - DNA, 20 bp, synthetic construct
  misc_feature 1..20: note = chemically synthesized
  source 1..20: mol_type = other DNA
gccaaaatgcataatttgta

SEQ ID NO: 50439 - DNA, 20 bp, synthetic construct
  misc_feature 1..20: note = chemically synthesized
  source 1..20: mol_type = other DNA
atttgtatagacatacttat

SEQ ID NO: 50440 - DNA, 20 bp, synthetic construct
  misc_feature 1..20: note = chemically synthesized
  source 1..20: mol_type = other DNA
gtatagacatacttattagc

SEQ ID NO: 50441 - DNA, 20 bp, synthetic construct
  misc_feature 1..20: note = chemically synthesized
  source 1..20: mol_type = other DNA
tagacatacttattagctgg

SEQ ID NO: 50442 - DNA, 20 bp, synthetic construct
  misc_feature 1..20: note = chemically synthesized
  source 1..20: mol_type = other DNA
agctggcagaaatgccacat

SEQ ID NO: 50443 - DNA, 20 bp, synthetic construct
  misc_feature 1..20: note = chemically synthesized
  source 1..20: mol_type = other DNA
tgccacattggctccctgac

SEQ ID NO: 50444 - DNA, 20 bp, synthetic construct
  misc_feature 1..20: note = chemically synthesized
  source 1..20: mol_type = other DNA
cacattggctccctgactgg

SEQ ID NO: 50445 - DNA, 20 bp, synthetic construct
  misc_feature 1..20: note = chemically synthesized
  source 1..20: mol_type = other DNA
acattggctccctgactggt

SEQ ID NO: 50446 - DNA, 20 bp, synthetic construct
  misc_feature 1..20: note = chemically synthesized
  source 1..20: mol_type = other DNA
ggctccctgactggtaggat

SEQ ID NO: 50447 - DNA, 20 bp, synthetic construct
  misc_feature 1..20: note = chemically synthesized
  source 1..20: mol_type = other DNA
gctccctgactggtaggatg

SEQ ID NO: 50448 - DNA, 20 bp, synthetic construct
  misc_feature 1..20: note = chemically synthesized
  source 1..20: mol_type = other DNA
ctccctgactggtaggatga

SEQ ID NO: 50449 - DNA, 20 bp, synthetic construct
  misc_feature 1..20: note = chemically synthesized
  source 1..20: mol_type = other DNA
tggtaggatgagggctatta

SEQ ID NO: 50450 - DNA, 20 bp, synthetic construct
  misc_feature 1..20: note = chemically synthesized
  source 1..20: mol_type = other DNA
taggatgagggctattatgg

SEQ ID NO: 50451 - DNA, 20 bp, synthetic construct
  misc_feature 1..20: note = chemically synthesized
  source 1..20: mol_type = other DNA
aggatgagggctattatggt

SEQ ID NO: 50452 - DNA, 20 bp, synthetic construct
  misc_feature 1..20: note = chemically synthesized
  source 1..20: mol_type = other DNA
tgagggctattatggtggga

SEQ ID NO: 50453 - DNA, 20 bp, synthetic construct
  misc_feature 1..20: note = chemically synthesized
  source 1..20: mol_type = other DNA
gagggctattatggtgggaa

SEQ ID NO: 50454 - DNA, 20 bp, synthetic construct
  misc_feature 1..20: note = chemically synthesized
  source 1..20: mol_type = other DNA
ttatggtgggaaaggccaaa

SEQ ID NO: 50455 - DNA, 20 bp, synthetic construct
  misc_feature 1..20: note = chemically synthesized
  source 1..20: mol_type = other DNA
tggtgggaaaggccaaacag

SEQ ID NO: 50456 - DNA, 20 bp, synthetic construct
  misc_feature 1..20: note = chemically synthesized
  source 1..20: mol_type = other DNA
aaaggccaaacagaagccat

SEQ ID NO: 50457 - DNA, 20 bp, synthetic construct
  misc_feature 1..20: note = chemically synthesized
  source 1..20: mol_type = other DNA
aggccaaacagaagccatta

SEQ ID NO: 50458 - DNA, 20 bp, synthetic construct
  misc_feature 1..20: note = chemically synthesized
  source 1..20: mol_type = other DNA
ccattagagctgtctctacc

SEQ ID NO: 50459 - DNA, 20 bp, synthetic construct
  misc_feature 1..20: note = chemically synthesized
  source 1..20: mol_type = other DNA
caaaaacaatatcccatccc

SEQ ID NO: 50460 - DNA, 20 bp, synthetic construct
  misc_feature 1..20: note = chemically synthesized
  source 1..20: mol_type = other DNA
aaaacaatatcccatccctg

SEQ ID NO: 50461 - DNA, 20 bp, synthetic construct
  misc_feature 1..20: note = chemically synthesized
  source 1..20: mol_type = other DNA
aaacaatatcccatccctgg

SEQ ID NO: 50462 - DNA, 20 bp, synthetic construct
  misc_feature 1..20: note = chemically synthesized
  source 1..20: mol_type = other DNA
aacaatatcccatccctgga

SEQ ID NO: 50463 - DNA, 20 bp, synthetic construct
  misc_feature 1..20: note = chemically synthesized
  source 1..20: mol_type = other DNA
tcccatccctggagggactg

SEQ ID NO: 50464 - DNA, 20 bp, synthetic construct
  misc_feature 1..20: note = chemically synthesized
  source 1..20: mol_type = other DNA
cctggagggactgaagtgat

SEQ ID NO: 50465 - DNA, 20 bp, synthetic construct
  misc_feature 1..20: note = chemically synthesized
  source 1..20: mol_type = other DNA
aagtgattagtgtcaccatc

SEQ ID NO: 50466 - DNA, 20 bp, synthetic construct
  misc_feature 1..20: note = chemically synthesized
  source 1..20: mol_type = other DNA
agtgattagtgtcaccatca

SEQ ID NO: 50467 - DNA, 20 bp, synthetic construct
  misc_feature 1..20: note = chemically synthesized
  source 1..20: mol_type = other DNA
tgtcaccatcaaggacttga

SEQ ID NO: 50468 - DNA, 20 bp, synthetic construct
  misc_feature 1..20: note = chemically synthesized
  source 1..20: mol_type = other DNA
catcaaggacttgaaagacg

SEQ ID NO: 50469 - DNA, 20 bp, synthetic construct
  misc_feature 1..20: note = chemically synthesized
  source 1..20: mol_type = other DNA
atcaaggacttgaaagacgc

SEQ ID NO: 50470 - DNA, 20 bp, synthetic construct
  misc_feature 1..20: note = chemically synthesized
  source 1..20: mol_type = other DNA
tcaaggacttgaaagacgca

SEQ ID NO: 50471 - DNA, 20 bp, synthetic construct
  misc_feature 1..20: note = chemically synthesized
  source 1..20: mol_type = other DNA
caaggacttgaaagacgcag

SEQ ID NO: 50472 - DNA, 20 bp, synthetic construct
  misc_feature 1..20: note = chemically synthesized
  source 1..20: mol_type = other DNA
ggacttgaaagacgcagggg

SEQ ID NO: 50473 - DNA, 20 bp, synthetic construct
  misc_feature 1..20: note = chemically synthesized
  source 1..20: mol_type = other DNA
actctcccatttgacctgtg

SEQ ID NO: 50474 - DNA, 20 bp, synthetic construct
  misc_feature 1..20: note = chemically synthesized
  source 1..20: mol_type = other DNA
tctcccatttgacctgtgca

SEQ ID NO: 50475 - DNA, 20 bp, synthetic construct
  misc_feature 1..20: note = chemically synthesized
  source 1..20: mol_type = other DNA
ctcccatttgacctgtgcag

SEQ ID NO: 50476 - DNA, 20 bp, synthetic construct
  misc_feature 1..20: note = chemically synthesized
  source 1..20: mol_type = other DNA
catttgacctgtgcagagga

SEQ ID NO: 50477 - DNA, 20 bp, synthetic construct
  misc_feature 1..20: note = chemically synthesized
  source 1..20: mol_type = other DNA
tgacctgtgcagaggacaga

SEQ ID NO: 50478 - DNA, 20 bp, synthetic construct
  misc_feature 1..20: note = chemically synthesized
  source 1..20: mol_type = other DNA
tgcagaggacagatggatct

SEQ ID NO: 50479 - DNA, 20 bp, synthetic construct
  misc_feature 1..20: note = chemically synthesized
  source 1..20: mol_type = other DNA
agatggatcttggaaaatga

SEQ ID NO: 50480 - DNA, 20 bp, synthetic construct
  misc_feature 1..20: note = chemically synthesized
  source 1..20: mol_type = other DNA
tggatcttggaaaatgatgg

SEQ ID NO: 50481 - DNA, 20 bp, synthetic construct
  misc_feature 1..20: note = chemically synthesized
  source 1..20: mol_type = other DNA
aaatgatggtggattatttt

SEQ ID NO: 50482 - DNA, 20 bp, synthetic construct
  misc_feature 1..20: note = chemically synthesized
  source 1..20: mol_type = other DNA
ggattattttaagcttaacc

SEQ ID NO: 50483 - DNA, 20 bp, synthetic construct
  misc_feature 1..20: note = chemically synthesized
  source 1..20: mol_type = other DNA
ttattttaagcttaaccaag

SEQ ID NO: 50484 - DNA, 20 bp, synthetic construct
  misc_feature 1..20: note = chemically synthesized
  source 1..20: mol_type = other DNA
ccaagtggtgactccaattg

SEQ ID NO: 50485 - DNA, 20 bp, synthetic construct
  misc_feature 1..20: note = chemically synthesized
  source 1..20: mol_type = other DNA
tccaattgcagctgctctac

SEQ ID NO: 50486 - DNA, 20 bp, synthetic construct
  misc_feature 1..20: note = chemically synthesized
  source 1..20: mol_type = other DNA
tgcagctgctctaccagttg

SEQ ID NO: 50487 - DNA, 20 bp, synthetic construct
  misc_feature 1..20: note = chemically synthesized
  source 1..20: mol_type = other DNA
cagttgtggttttgttgctt

SEQ ID NO: 50488 - DNA, 20 bp, synthetic construct
  misc_feature 1..20: note = chemically synthesized
  source 1..20: mol_type = other DNA
gagcaaattaacacatctcc

SEQ ID NO: 50489 - DNA, 20 bp, synthetic construct
  misc_feature 1..20: note = chemically synthesized
  source 1..20: mol_type = other DNA
ttaacacatctcctggtgcc

SEQ ID NO: 50490 - DNA, 20 bp, synthetic construct
  misc_feature 1..20: note = chemically synthesized
  source 1..20: mol_type = other DNA
atctcctggtgcctggtatg

SEQ ID NO: 50491 - DNA, 20 bp, synthetic construct
  misc_feature 1..20: note = chemically synthesized
  source 1..20: mol_type = other DNA
ggtgcctggtatgcagccat

SEQ ID NO: 50492 - DNA, 20 bp, synthetic construct
  misc_feature 1..20: note = chemically synthesized
  source 1..20: mol_type = other DNA
ctggtatgcagccattggct

SEQ ID NO: 50493 - DNA, 20 bp, synthetic construct
  misc_feature 1..20: note = chemically synthesized
  source 1..20: mol_type = other DNA
tatgcagccattggcttggc

SEQ ID NO: 50494 - DNA, 20 bp, synthetic construct
  misc_feature 1..20: note = chemically synthesized
  source 1..20: mol_type = other DNA
gcagccattggcttggcaag

SEQ ID NO: 50495 - DNA, 20 bp, synthetic construct
  misc_feature 1..20: note = chemically synthesized
  source 1..20: mol_type = other DNA
ttttctccattcctgtccat

SEQ ID NO: 50496 - DNA, 20 bp, synthetic construct
  misc_feature 1..20: note = chemically synthesized
  source 1..20: mol_type = other DNA
ttcctgtccataagacccac

SEQ ID NO: 50497 - DNA, 20 bp, synthetic construct
  misc_feature 1..20: note = chemically synthesized
  source 1..20: mol_type = other DNA
ctgtccataagacccaccag

SEQ ID NO: 50498 - DNA, 20 bp, synthetic construct
  misc_feature 1..20: note = chemically synthesized
  source 1..20: mol_type = other DNA
caccagaagcaatttgcctt

SEQ ID NO: 50499 - DNA, 20 bp, synthetic construct
  misc_feature 1..20: note = chemically synthesized
  source 1..20: mol_type = other DNA
gcaatttgccttcagctgac

SEQ ID NO: 50500 - DNA, 20 bp, synthetic construct
  misc_feature 1..20: note = chemically synthesized
  source 1..20: mol_type = other DNA
caatttgccttcagctgaca

SEQ ID NO: 50501 - DNA, 20 bp, synthetic construct
  misc_feature 1..20: note = chemically synthesized
  source 1..20: mol_type = other DNA
ttgccttcagctgacaaggc

SEQ ID NO: 50502 - DNA, 20 bp, synthetic construct
  misc_feature 1..20: note = chemically synthesized
  source 1..20: mol_type = other DNA
atacctttaccaccctacct

SEQ ID NO: 50503 - DNA, 20 bp, synthetic construct
  misc_feature 1..20: note = chemically synthesized
  source 1..20: mol_type = other DNA
tacctttaccaccctacctc

SEQ ID NO: 50504 - DNA, 20 bp, synthetic construct
  misc_feature 1..20: note = chemically synthesized
  source 1..20: mol_type = other DNA
acctttaccaccctacctca

SEQ ID NO: 50505 - DNA, 20 bp, synthetic construct
  misc_feature 1..20: note = chemically synthesized
  source 1..20: mol_type = other DNA
cctttaccaccctacctcag

SEQ ID NO: 50506 - DNA, 20 bp, synthetic construct
  misc_feature 1..20: note = chemically synthesized
  source 1..20: mol_type = other DNA
tcaggggtgtatcaactctc

SEQ ID NO: 50507 - DNA, 20 bp, synthetic construct
  misc_feature 1..20: note = chemically synthesized
  source 1..20: mol_type = other DNA
ctttgtgtcataatcttatt

SEQ ID NO: 50508 - DNA, 20 bp, synthetic construct
  misc_feature 1..20: note = chemically synthesized
  source 1..20: mol_type = other DNA
ttgtgtcataatcttatttg

SEQ ID NO: 50509 - DNA, 20 bp, synthetic construct
  misc_feature 1..20: note = chemically synthesized
  source 1..20: mol_type = other DNA
gtgtcataatcttatttgga

SEQ ID NO: 50510 - DNA, 20 bp, synthetic construct
  misc_feature 1..20: note = chemically synthesized
  source 1..20: mol_type = other DNA
tgctcgcttttcacttccac

SEQ ID NO: 50511 - DNA, 20 bp, synthetic construct
  misc_feature 1..20: note = chemically synthesized
  source 1..20: mol_type = other DNA
acttccacgagatataacac

SEQ ID NO: 50512 - DNA, 20 bp, synthetic construct
  misc_feature 1..20: note = chemically synthesized
  source 1..20: mol_type = other DNA
attcatgacattatgatgat

SEQ ID NO: 50513 - DNA, 20 bp, synthetic construct
  misc_feature 1..20: note = chemically synthesized
  source 1..20: mol_type = other DNA
gacattatgatgattggata

SEQ ID NO: 50514 - DNA, 20 bp, synthetic construct
  misc_feature 1..20: note = chemically synthesized
  source 1..20: mol_type = other DNA
ttatgatgattggatacagt

SEQ ID NO: 50515 - DNA, 20 bp, synthetic construct
  misc_feature 1..20: note = chemically synthesized
  source 1..20: mol_type = other DNA
gatgattggatacagtgagc

SEQ ID NO: 50516 - DNA, 20 bp, synthetic construct
  misc_feature 1..20: note = chemically synthesized
  source 1..20: mol_type = other DNA
gattggatacagtgagcaag

SEQ ID NO: 50517 - DNA, 20 bp, synthetic construct
  misc_feature 1..20: note = chemically synthesized
  source 1..20: mol_type = other DNA
tggatacagtgagcaagaag

SEQ ID NO: 50518 - DNA, 20 bp, synthetic construct
  misc_feature 1..20: note = chemically synthesized
  source 1..20: mol_type = other DNA
agcaaacacactgaacttat

SEQ ID NO: 50519 - DNA, 20 bp, synthetic construct
  misc_feature 1..20: note = chemically synthesized
  source 1..20: mol_type = other DNA
aacacactgaacttattggt

SEQ ID NO: 50520 - DNA, 20 bp, synthetic construct
  misc_feature 1..20: note = chemically synthesized
  source 1..20: mol_type = other DNA
ttggtgagacatttgtatgc

SEQ ID NO: 50521 - DNA, 20 bp, synthetic construct
  misc_feature 1..20: note = chemically synthesized
  source 1..20: mol_type = other DNA
ggtgagacatttgtatgcca

SEQ ID NO: 50522 - DNA, 20 bp, synthetic construct
  misc_feature 1..20: note = chemically synthesized
  source 1..20: mol_type = other DNA
gtgagacatttgtatgccag

SEQ ID NO: 50523 - DNA, 20 bp, synthetic construct
  misc_feature 1..20: note = chemically synthesized
  source 1..20: mol_type = other DNA
gacatttgtatgccagagga

SEQ ID NO: 50524 - DNA, 20 bp, synthetic construct
  misc_feature 1..20: note = chemically synthesized
  source 1..20: mol_type = other DNA
acatttgtatgccagaggat

SEQ ID NO: 50525 - DNA, 20 bp, synthetic construct
  misc_feature 1..20: note = chemically synthesized
  source 1..20: mol_type = other DNA
cagaggatgggaaataaatc

SEQ ID NO: 50526 - DNA, 20 bp, synthetic construct
  misc_feature 1..20: note = chemically synthesized
  source 1..20: mol_type = other DNA
aaataaatccagctaaaatt

SEQ ID NO: 50527 - DNA, 20 bp, synthetic construct
  misc_feature 1..20: note = chemically synthesized
  source 1..20: mol_type = other DNA
aataaatccagctaaaattt

SEQ ID NO: 50528 - DNA, 20 bp, synthetic construct
  misc_feature 1..20: note = chemically synthesized
  source 1..20: mol_type = other DNA
ataaatccagctaaaattta

SEQ ID NO: 50529 - DNA, 20 bp, synthetic construct
  misc_feature 1..20: note = chemically synthesized
  source 1..20: mol_type = other DNA
aatttagggactttctacct

SEQ ID NO: 50530 - DNA, 20 bp, synthetic construct
  misc_feature 1..20: note = chemically synthesized
  source 1..20: mol_type = other DNA
ttctacctcggtaaaatttc

SEQ ID NO: 50531 - DNA, 20 bp, synthetic construct
  misc_feature 1..20: note = chemically synthesized
  source 1..20: mol_type = other DNA
tctacctcggtaaaatttct

SEQ ID NO: 50532 - DNA, 20 bp, synthetic construct
  misc_feature 1..20: note = chemically synthesized
  source 1..20: mol_type = other DNA
ctacctcggtaaaatttcta

SEQ ID NO: 50533 - DNA, 20 bp, synthetic construct
  misc_feature 1..20: note = chemically synthesized
  source 1..20: mol_type = other DNA
cggtaaaatttctagggttc

SEQ ID NO: 50534 - DNA, 20 bp, synthetic construct
  misc_feature 1..20: note = chemically synthesized
  source 1..20: mol_type = other DNA
taaaatttctagggttccag

SEQ ID NO: 50535 - DNA, 20 bp, synthetic construct
  misc_feature 1..20: note = chemically synthesized
  source 1..20: mol_type = other DNA
ttctagggttccagtggcat

SEQ ID NO: 50536 - DNA, 20 bp, synthetic construct
  misc_feature 1..20: note = chemically synthesized
  source 1..20: mol_type = other DNA
ttccagtggcatgagaccta

SEQ ID NO: 50537 - DNA, 20 bp, synthetic construct
  misc_feature 1..20: note = chemically synthesized
  source 1..20: mol_type = other DNA
ccagtggcatgagacctatg

SEQ ID NO: 50538 - DNA, 20 bp, synthetic construct
  misc_feature 1..20: note = chemically synthesized
  source 1..20: mol_type = other DNA
cctatggagatattccttct

SEQ ID NO: 50539 - DNA, 20 bp, synthetic construct
  misc_feature 1..20: note = chemically synthesized
  source 1..20: mol_type = other DNA
ctatggagatattccttcta

SEQ ID NO: 50540 - DNA, 20 bp, synthetic construct
  misc_feature 1..20: note = chemically synthesized
  source 1..20: mol_type = other DNA
gagatattccttctaaggtg

SEQ ID NO: 50541 - DNA, 20 bp, synthetic construct
  misc_feature 1..20: note = chemically synthesized
  source 1..20: mol_type = other DNA
gaagcataacttgctgcgtt

SEQ ID NO: 50542 - DNA, 20 bp, synthetic construct
  misc_feature 1..20: note = chemically synthesized
  source 1..20: mol_type = other DNA
gtttggcccctcttacaacc

SEQ ID NO: 50543 - DNA, 20 bp, synthetic construct
  misc_feature 1..20: note = chemically synthesized
  source 1..20: mol_type = other DNA
ggcccctcttacaaccaaga

SEQ ID NO: 50544 - DNA, 20 bp, synthetic construct
  misc_feature 1..20: note = chemically synthesized
  source 1..20: mol_type = other DNA
cccctcttacaaccaagaaa

SEQ ID NO: 50545 - DNA, 20 bp, synthetic construct
  misc_feature 1..20: note = chemically synthesized
  source 1..20: mol_type = other DNA
ccctcttacaaccaagaaag

SEQ ID NO: 50546 - DNA, 20 bp, synthetic construct
  misc_feature 1..20: note = chemically synthesized
  source 1..20: mol_type = other DNA
caagaaagaggcacaatgcc

SEQ ID NO: 50547 - DNA, 20 bp, synthetic construct
  misc_feature 1..20: note = chemically synthesized
  source 1..20: mol_type = other DNA
gaaagaggcacaatgcctgg

SEQ ID NO: 50548 - DNA, 20 bp, synthetic construct
  misc_feature 1..20: note = chemically synthesized
  source 1..20: mol_type = other DNA
aaagaggcacaatgcctggt

SEQ ID NO: 50549 - DNA, 20 bp, synthetic construct
  misc_feature 1..20: note = chemically synthesized
  source 1..20: mol_type = other DNA
caatgcctggtgggcctatt

SEQ ID NO: 50550 - DNA, 20 bp, synthetic construct
  misc_feature 1..20: note = chemically synthesized
  source 1..20: mol_type = other DNA
tggtgggcctatttggattt

SEQ ID NO: 50551 - DNA, 20 bp, synthetic construct
  misc_feature 1..20: note = chemically synthesized
  source 1..20: mol_type = other DNA
gtgggcctatttggattttg

SEQ ID NO: 50552 - DNA, 20 bp, synthetic construct
  misc_feature 1..20: note = chemically synthesized
  source 1..20: mol_type = other DNA
tgggcctatttggattttgg

SEQ ID NO: 50553 - DNA, 20 bp, synthetic construct
  misc_feature 1..20: note = chemically synthesized
  source 1..20: mol_type = other DNA
gaggcaacacattcctcgtt

SEQ ID NO: 50554 - DNA, 20 bp, synthetic construct
  misc_feature 1..20: note = chemically synthesized
  source 1..20: mol_type = other DNA
aggcaacacattcctcgttt

SEQ ID NO: 50555 - DNA, 20 bp, synthetic construct
  misc_feature 1..20: note = chemically synthesized
  source 1..20: mol_type = other DNA
ctcgtttgggtgtgttactc

SEQ ID NO: 50556 - DNA, 20 bp, synthetic construct
  misc_feature 1..20: note = chemically synthesized
  source 1..20: mol_type = other DNA
gttactctggcccatttatc

SEQ ID NO: 50557 - DNA, 20 bp, synthetic construct
  misc_feature 1..20: note = chemically synthesized
  source 1..20: mol_type = other DNA
ccatttatcgagtgacctga

SEQ ID NO: 50558 - DNA, 20 bp, synthetic construct
  misc_feature 1..20: note = chemically synthesized
  source 1..20: mol_type = other DNA
catttatcgagtgacctgaa

SEQ ID NO: 50559 - DNA, 20 bp, synthetic construct
  misc_feature 1..20: note = chemically synthesized
  source 1..20: mol_type = other DNA
cgagtgacctgaaaggctgc

SEQ ID NO: 50560 - DNA, 20 bp, synthetic construct
  misc_feature 1..20: note = chemically synthesized
  source 1..20: mol_type = other DNA
cctgaaaggctgccagattt

SEQ ID NO: 50561 - DNA, 20 bp, synthetic construct
  misc_feature 1..20: note = chemically synthesized
  source 1..20: mol_type = other DNA
aaggctgccagatttaagtg

SEQ ID NO: 50562 - DNA, 20 bp, synthetic construct
  misc_feature 1..20: note = chemically synthesized
  source 1..20: mol_type = other DNA
tgccagatttaagtgcagtc

SEQ ID NO: 50563 - DNA, 20 bp, synthetic construct
  misc_feature 1..20: note = chemically synthesized
  source 1..20: mol_type = other DNA
ttaagtgcagtctagaacaa

SEQ ID NO: 50564 - DNA, 20 bp, synthetic construct
  misc_feature 1..20: note = chemically synthesized
  source 1..20: mol_type = other DNA
agtgcagtctagaacaaaag

SEQ ID NO: 50565 - DNA, 20 bp, synthetic construct
  misc_feature 1..20: note = chemically synthesized
  source 1..20: mol_type = other DNA
gtgcagtctagaacaaaaga

SEQ ID NO: 50566 - DNA, 20 bp, synthetic construct
  misc_feature 1..20: note = chemically synthesized
  source 1..20: mol_type = other DNA
aacaaaagaaggctctgaaa

SEQ ID NO: 50567 - DNA, 20 bp, synthetic construct
  misc_feature 1..20: note = chemically synthesized
  source 1..20: mol_type = other DNA
acaaaagaaggctctgaaac

SEQ ID NO: 50568 - DNA, 20 bp, synthetic construct
  misc_feature 1..20: note = chemically synthesized
  source 1..20: mol_type = other DNA
agaaggctctgaaacaggtc

SEQ ID NO: 50569 - DNA, 20 bp, synthetic construct
  misc_feature 1..20: note = chemically synthesized
  source 1..20: mol_type = other DNA
gaaggctctgaaacaggtcc

SEQ ID NO: 50570 - DNA, 20 bp, synthetic construct
  misc_feature 1..20: note = chemically synthesized
  source 1..20: mol_type = other DNA
acaggtccaggctgctgtga

SEQ ID NO: 50571 - DNA, 20 bp, synthetic construct
  misc_feature 1..20: note = chemically synthesized
  source 1..20: mol_type = other DNA
gtgaaagctgctctgccatt

SEQ ID NO: 50572 - DNA, 20 bp, synthetic construct
  misc_feature 1..20: note = chemically synthesized
  source 1..20: mol_type = other DNA
tgaaagctgctctgccattt

SEQ ID NO: 50573 - DNA, 20 bp, synthetic construct
  misc_feature 1..20: note = chemically synthesized
  source 1..20: mol_type = other DNA
atttgggccacatgaccccg

SEQ ID NO: 50574 - DNA, 20 bp, synthetic construct
  misc_feature 1..20: note = chemically synthesized
  source 1..20: mol_type = other DNA
acatgaccccgcagatccaa

SEQ ID NO: 50575 - DNA, 20 bp, synthetic construct
  misc_feature 1..20: note = chemically synthesized
  source 1..20: mol_type = other DNA
ccgcagatccaatggtgctt

SEQ ID NO: 50576 - DNA, 20 bp, synthetic construct
  misc_feature 1..20: note = chemically synthesized
  source 1..20: mol_type = other DNA
cgcagatccaatggtgcttg

SEQ ID NO: 50577 - DNA, 20 bp, synthetic construct
  misc_feature 1..20: note = chemically synthesized
  source 1..20: mol_type = other DNA
tccaatggtgcttgaggtgt

SEQ ID NO: 50578 - DNA, 20 bp, synthetic construct
  misc_feature 1..20: note = chemically synthesized
  source 1..20: mol_type = other DNA
aatggtgcttgaggtgtcag

SEQ ID NO: 50579 - DNA, 20 bp, synthetic construct
  misc_feature 1..20: note = chemically synthesized
  source 1..20: mol_type = other DNA
ggtgcttgaggtgtcagtgg

SEQ ID NO: 50580 - DNA, 20 bp, synthetic construct
  misc_feature 1..20: note = chemically synthesized
  source 1..20: mol_type = other DNA
cttgaggtgtcagtggcaga

SEQ ID NO: 50581 - DNA, 20 bp, synthetic construct
  misc_feature 1..20: note = chemically synthesized
  source 1..20: mol_type = other DNA
ttgaggtgtcagtggcagat

SEQ ID NO: 50582 - DNA, 20 bp, synthetic construct
  misc_feature 1..20: note = chemically synthesized
  source 1..20: mol_type = other DNA
tgaggtgtcagtggcagata

SEQ ID NO: 50583 - DNA, 20 bp, synthetic construct
  misc_feature 1..20: note = chemically synthesized
  source 1..20: mol_type = other DNA
tggcagatagggatgctgtt

SEQ ID NO: 50584 - DNA, 20 bp, synthetic construct
  misc_feature 1..20: note = chemically synthesized
  source 1..20: mol_type = other DNA
gcagatagggatgctgtttg

SEQ ID NO: 50585 - DNA, 20 bp, synthetic construct
  misc_feature 1..20: note = chemically synthesized
  source 1..20: mol_type = other DNA
gggatgctgtttggagcctt

SEQ ID NO: 50586 - DNA, 20 bp, synthetic construct
  misc_feature 1..20: note = chemically synthesized
  source 1..20: mol_type = other DNA
atgctgtttggagcctttgg

SEQ ID NO: 50587 - DNA, 20 bp, synthetic construct
  misc_feature 1..20: note = chemically synthesized
  source 1..20: mol_type = other DNA
tgctgtttggagcctttggc

SEQ ID NO: 50588 - DNA, 20 bp, synthetic construct
  misc_feature 1..20: note = chemically synthesized
  source 1..20: mol_type = other DNA
gagcctttggcaggccccca

SEQ ID NO: 50589 - DNA, 20 bp, synthetic construct
  misc_feature 1..20: note = chemically synthesized
  source 1..20: mol_type = other DNA
agcctttggcaggcccccat

SEQ ID NO: 50590 - DNA, 20 bp, synthetic construct
  misc_feature 1..20: note = chemically synthesized
  source 1..20: mol_type = other DNA
aggcccccataggtgaatca

SEQ ID NO: 50591 - DNA, 20 bp, synthetic construct
  misc_feature 1..20: note = chemically synthesized
  source 1..20: mol_type = other DNA
cccccataggtgaatcacag

SEQ ID NO: 50592 - DNA, 20 bp, synthetic construct
  misc_feature 1..20: note = chemically synthesized
  source 1..20: mol_type = other DNA
cccataggtgaatcacagtg

SEQ ID NO: 50593 - DNA, 20 bp, synthetic construct
  misc_feature 1..20: note = chemically synthesized
  source 1..20: mol_type = other DNA
tgaatcacagtggagacctc

SEQ ID NO: 50594 - DNA, 20 bp, synthetic construct
  misc_feature 1..20: note = chemically synthesized
  source 1..20: mol_type = other DNA
gaatcacagtggagacctct

SEQ ID NO: 50595 - DNA, 20 bp, synthetic construct
  misc_feature 1..20: note = chemically synthesized
  source 1..20: mol_type = other DNA
agtggagacctctaggattt

SEQ ID NO: 50596 - DNA, 20 bp, synthetic construct
  misc_feature 1..20: note = chemically synthesized
  source 1..20: mol_type = other DNA
tggagacctctaggattttg

SEQ ID NO: 50597 - DNA, 20 bp, synthetic construct
  misc_feature 1..20: note = chemically synthesized
  source 1..20: mol_type = other DNA
gacctctaggattttggagc

SEQ ID NO: 50598 - DNA, 20 bp, synthetic construct
  misc_feature 1..20: note = chemically synthesized
  source 1..20: mol_type = other DNA
acctctaggattttggagca

SEQ ID NO: 50599 - DNA, 20 bp, synthetic construct
  misc_feature 1..20: note = chemically synthesized
  source 1..20: mol_type = other DNA
gcaaggccctgccacttctg

SEQ ID NO: 50600 - DNA, 20 bp, synthetic construct
  misc_feature 1..20: note = chemically synthesized
  source 1..20: mol_type = other DNA
cagataactactctcctttt

SEQ ID NO: 50601 - DNA, 20 bp, synthetic construct
  misc_feature 1..20: note = chemically synthesized
  source 1..20: mol_type = other DNA
gataactactctccttttga

SEQ ID NO: 50602 - DNA, 20 bp, synthetic construct
  misc_feature 1..20: note = chemically synthesized
  source 1..20: mol_type = other DNA
actactctccttttgagaga

SEQ ID NO: 50603 - DNA, 20 bp, synthetic construct
  misc_feature 1..20: note = chemically synthesized
  source 1..20: mol_type = other DNA
tccttttgagagacagctat

SEQ ID NO: 50604 - DNA, 20 bp, synthetic construct
  misc_feature 1..20: note = chemically synthesized
  source 1..20: mol_type = other DNA
gacagctattggtctgttat

SEQ ID NO: 50605 - DNA, 20 bp, synthetic construct
  misc_feature 1..20: note = chemically synthesized
  source 1..20: mol_type = other DNA
acagctattggtctgttatt

SEQ ID NO: 50606 - DNA, 20 bp, synthetic construct
  misc_feature 1..20: note = chemically synthesized
  source 1..20: mol_type = other DNA
attggtctgttattgggctt

SEQ ID NO: 50607 - DNA, 20 bp, synthetic construct
  misc_feature 1..20: note = chemically synthesized
  source 1..20: mol_type = other DNA
ggtctgttattgggctttgg

SEQ ID NO: 50608 - DNA, 20 bp, synthetic construct
  misc_feature 1..20: note = chemically synthesized
  source 1..20: mol_type = other DNA
ggtaactgaacgtttgactg

SEQ ID NO: 50609 - DNA, 20 bp, synthetic construct
  misc_feature 1..20: note = chemically synthesized
  source 1..20: mol_type = other DNA
gtaactgaacgtttgactgt

SEQ ID NO: 50610 - DNA, 20 bp, synthetic construct
  misc_feature 1..20: note = chemically synthesized
  source 1..20: mol_type = other DNA
acgtttgactgtgggtcata

SEQ ID NO: 50611 - DNA, 20 bp, synthetic construct
  misc_feature 1..20: note = chemically synthesized
  source 1..20: mol_type = other DNA
tgaacctgcctatcatgaac

SEQ ID NO: 50612 - DNA, 20 bp, synthetic construct
  misc_feature 1..20: note = chemically synthesized
  source 1..20: mol_type = other DNA
tggttgctttctgacccatc

SEQ ID NO: 50613 - DNA, 20 bp, synthetic construct
  misc_feature 1..20: note = chemically synthesized
  source 1..20: mol_type = other DNA
ttctgacccatctagccatg

SEQ ID NO: 50614 - DNA, 20 bp, synthetic construct
  misc_feature 1..20: note = chemically synthesized
  source 1..20: mol_type = other DNA
tgacccatctagccatgaag

SEQ ID NO: 50615 - DNA, 20 bp, synthetic construct
  misc_feature 1..20: note = chemically synthesized
  source 1..20: mol_type = other DNA
gacccatctagccatgaagt

SEQ ID NO: 50616 - DNA, 20 bp, synthetic construct
  misc_feature 1..20: note = chemically synthesized
  source 1..20: mol_type = other DNA
catctagccatgaagtgggt

SEQ ID NO: 50617 - DNA, 20 bp, synthetic construct
  misc_feature 1..20: note = chemically synthesized
  source 1..20: mol_type = other DNA
agccatgaagtgggtcagca

SEQ ID NO: 50618 - DNA, 20 bp, synthetic construct
  misc_feature 1..20: note = chemically synthesized
  source 1..20: mol_type = other DNA
catgaagtgggtcagcacag

SEQ ID NO: 50619 - DNA, 20 bp, synthetic construct
  misc_feature 1..20: note = chemically synthesized
  source 1..20: mol_type = other DNA
ggcatttcatcatcaaattg

SEQ ID NO: 50620 - DNA, 20 bp, synthetic construct
  misc_feature 1..20: note = chemically synthesized
  source 1..20: mol_type = other DNA
atttcatcatcaaattgaag

SEQ ID NO: 50621 - DNA, 20 bp, synthetic construct
  misc_feature 1..20: note = chemically synthesized
  source 1..20: mol_type = other DNA
tgaagtggtgtgtatgtgat

SEQ ID NO: 50622 - DNA, 20 bp, synthetic construct
  misc_feature 1..20: note = chemically synthesized
  source 1..20: mol_type = other DNA
gaagtggtgtgtatgtgatc

SEQ ID NO: 50623 - DNA, 20 bp, synthetic construct
  misc_feature 1..20: note = chemically synthesized
  source 1..20: mol_type = other DNA
gtgtgtatgtgatcgggctt

SEQ ID NO: 50624 - DNA, 20 bp, synthetic construct
  misc_feature 1..20: note = chemically synthesized
  source 1..20: mol_type = other DNA
tgtatgtgatcgggcttgag

SEQ ID NO: 50625 - DNA, 20 bp, synthetic construct
  misc_feature 1..20: note = chemically synthesized
  source 1..20: mol_type = other DNA
gtatgtgatcgggcttgagc

SEQ ID NO: 50626 - DNA, 20 bp, synthetic construct
  misc_feature 1..20: note = chemically synthesized
  source 1..20: mol_type = other DNA
tcgggcttgagcaggtcctg

SEQ ID NO: 50627 - DNA, 20 bp, synthetic construct
  misc_feature 1..20: note = chemically synthesized
  source 1..20: mol_type = other DNA
cgggcttgagcaggtcctga

SEQ ID NO: 50628 - DNA, 20 bp, synthetic construct
  misc_feature 1..20: note = chemically synthesized
  source 1..20: mol_type = other DNA
tgagcaggtcctgaaggcac

SEQ ID NO: 50629 - DNA, 20 bp, synthetic construct
  misc_feature 1..20: note = chemically synthesized
  source 1..20: mol_type = other DNA
caggtcctgaaggcacaagt

SEQ ID NO: 50630 - DNA, 20 bp, synthetic construct
  misc_feature 1..20: note = chemically synthesized
  source 1..20: mol_type = other DNA
aaggcacaagtaagttacat

SEQ ID NO: 50631 - DNA, 20 bp, synthetic construct
  misc_feature 1..20: note = chemically synthesized
  source 1..20: mol_type = other DNA
aggcacaagtaagttacata

SEQ ID NO: 50632 - DNA, 20 bp, synthetic construct
  misc_feature 1..20: note = chemically synthesized
  source 1..20: mol_type = other DNA
cacaagtaagttacataagg

SEQ ID NO: 50633 - DNA, 20 bp, synthetic construct
  misc_feature 1..20: note = chemically synthesized
  source 1..20: mol_type = other DNA
aagtaagttacataaggaag

SEQ ID NO: 50634 - DNA, 20 bp, synthetic construct
  misc_feature 1..20: note = chemically synthesized
  source 1..20: mol_type = other DNA
ccaccctgccttccctcccc

SEQ ID NO: 50635 - DNA, 20 bp, synthetic construct
  misc_feature 1..20: note = chemically synthesized
  source 1..20: mol_type = other DNA
cctcccccagcctgcaccaa

SEQ ID NO: 50636 - DNA, 20 bp, synthetic construct
  misc_feature 1..20: note = chemically synthesized
  source 1..20: mol_type = other DNA
agcctgcaccaatggcctca

SEQ ID NO: 50637 - DNA, 20 bp, synthetic construct
  misc_feature 1..20: note = chemically synthesized
  source 1..20: mol_type = other DNA
gcctgcaccaatggcctcat

SEQ ID NO: 50638 - DNA, 20 bp, synthetic construct
  misc_feature 1..20: note = chemically synthesized
  source 1..20: mol_type = other DNA
cctgcaccaatggcctcatg

SEQ ID NO: 50639 - DNA, 20 bp, synthetic construct
  misc_feature 1..20: note = chemically synthesized
  source 1..20: mol_type = other DNA
tgcaccaatggcctcatggg

SEQ ID NO: 50640 - DNA, 20 bp, synthetic construct
  misc_feature 1..20: note = chemically synthesized
  source 1..20: mol_type = other DNA
catggggagttccctatgat

SEQ ID NO: 50641 - DNA, 20 bp, synthetic construct
  misc_feature 1..20: note = chemically synthesized
  source 1..20: mol_type = other DNA
agttccctatgatcagttga

SEQ ID NO: 50642 - DNA, 20 bp, synthetic construct
  misc_feature 1..20: note = chemically synthesized
  source 1..20: mol_type = other DNA
ttccctatgatcagttgaca

SEQ ID NO: 50643 - DNA, 20 bp, synthetic construct
  misc_feature 1..20: note = chemically synthesized
  source 1..20: mol_type = other DNA
tccctatgatcagttgacag

SEQ ID NO: 50644 - DNA, 20 bp, synthetic construct
  misc_feature 1..20: note = chemically synthesized
  source 1..20: mol_type = other DNA
ctatgatcagttgacagagg

SEQ ID NO: 50645 - DNA, 20 bp, synthetic construct
  misc_feature 1..20: note = chemically synthesized
  source 1..20: mol_type = other DNA
tatgatcagttgacagagga

SEQ ID NO: 50646 - DNA, 20 bp, synthetic construct
  misc_feature 1..20: note = chemically synthesized
  source 1..20: mol_type = other DNA
atgatcagttgacagaggaa

SEQ ID NO: 50647 - DNA, 20 bp, synthetic construct
  misc_feature 1..20: note = chemically synthesized
  source 1..20: mol_type = other DNA
atcagttgacagaggaaggg

SEQ ID NO: 50648 - DNA, 20 bp, synthetic construct
  misc_feature 1..20: note = chemically synthesized
  source 1..20: mol_type = other DNA
tgacagaggaagggaagact

SEQ ID NO: 50649 - DNA, 20 bp, synthetic construct
  misc_feature 1..20: note = chemically synthesized
  source 1..20: mol_type = other DNA
gacagaggaagggaagacta

SEQ ID NO: 50650 - DNA, 20 bp, synthetic construct
  misc_feature 1..20: note = chemically synthesized
  source 1..20: mol_type = other DNA
aggaagggaagactaaggac

SEQ ID NO: 50651 - DNA, 20 bp, synthetic construct
  misc_feature 1..20: note = chemically synthesized
  source 1..20: mol_type = other DNA
gaagactaaggactggttca

SEQ ID NO: 50652 - DNA, 20 bp, synthetic construct
  misc_feature 1..20: note = chemically synthesized
  source 1..20: mol_type = other DNA
actaaggactggttcataga

SEQ ID NO: 50653 - DNA, 20 bp, synthetic construct
  misc_feature 1..20: note = chemically synthesized
  source 1..20: mol_type = other DNA
agatggttctgcacgatatg

SEQ ID NO: 50654 - DNA, 20 bp, synthetic construct
  misc_feature 1..20: note = chemically synthesized
  source 1..20: mol_type = other DNA
gatggttctgcacgatatgc

SEQ ID NO: 50655 - DNA, 20 bp, synthetic construct
  misc_feature 1..20: note = chemically synthesized
  source 1..20: mol_type = other DNA
gatatgcaggcaccacccga

SEQ ID NO: 50656 - DNA, 20 bp, synthetic construct
  misc_feature 1..20: note = chemically synthesized
  source 1..20: mol_type = other DNA
atgcaggcaccacccgaaag

SEQ ID NO: 50657 - DNA, 20 bp, synthetic construct
  misc_feature 1..20: note = chemically synthesized
  source 1..20: mol_type = other DNA
aggcaccacccgaaagtgga

SEQ ID NO: 50658 - DNA, 20 bp, synthetic construct
  misc_feature 1..20: note = chemically synthesized
  source 1..20: mol_type = other DNA
cacccgaaagtggacagctg

SEQ ID NO: 50659 - DNA, 20 bp, synthetic construct
  misc_feature 1..20: note = chemically synthesized
  source 1..20: mol_type = other DNA
tgcatgtgtacacttgtgct

SEQ ID NO: 50660 - DNA, 20 bp, synthetic construct
  misc_feature 1..20: note = chemically synthesized
  source 1..20: mol_type = other DNA
tttcctttatcatgtgacct

SEQ ID NO: 50661 - DNA, 20 bp, synthetic construct
  misc_feature 1..20: note = chemically synthesized
  source 1..20: mol_type = other DNA
atcatgtgaccttagattta

SEQ ID NO: 50662 - DNA, 20 bp, synthetic construct
  misc_feature 1..20: note = chemically synthesized
  source 1..20: mol_type = other DNA
tagatttatggacttcacat

SEQ ID NO: 50663 - DNA, 20 bp, synthetic construct
  misc_feature 1..20: note = chemically synthesized
  source 1..20: mol_type = other DNA
tggacttcacatcagcattt

SEQ ID NO: 50664 - DNA, 20 bp, synthetic construct
  misc_feature 1..20: note = chemically synthesized
  source 1..20: mol_type = other DNA
acatcagcatttaagcattt

SEQ ID NO: 50665 - DNA, 20 bp, synthetic construct
  misc_feature 1..20: note = chemically synthesized
  source 1..20: mol_type = other DNA
catttaagtgttgttcatat

SEQ ID NO: 50666 - DNA, 20 bp, synthetic construct
  misc_feature 1..20: note = chemically synthesized
  source 1..20: mol_type = other DNA
taaccttatgtaataacttt

SEQ ID NO: 50667 - DNA, 20 bp, synthetic construct
  misc_feature 1..20: note = chemically synthesized
  source 1..20: mol_type = other DNA
ttatgtaataacttttggtt

SEQ ID NO: 50668 - DNA, 20 bp, synthetic construct
  misc_feature 1..20: note = chemically synthesized
  source 1..20: mol_type = other DNA
tatgtaataacttttggttt

SEQ ID NO: 50669 - DNA, 20 bp, synthetic construct
  misc_feature 1..20: note = chemically synthesized
  source 1..20: mol_type = other DNA
atgtaataacttttggtttg

SEQ ID NO: 50670 - DNA, 20 bp, synthetic construct
  misc_feature 1..20: note = chemically synthesized
  source 1..20: mol_type = other DNA
ataacttttggtttggggat

SEQ ID NO: 50671 - DNA, 20 bp, synthetic construct
  misc_feature 1..20: note = chemically synthesized
  source 1..20: mol_type = other DNA
tttggggattggtgcgtttc

SEQ ID NO: 50672 - DNA, 20 bp, synthetic construct
  misc_feature 1..20: note = chemically synthesized
  source 1..20: mol_type = other DNA
tggtgcgtttctggttgtat

SEQ ID NO: 50673 - DNA, 20 bp, synthetic construct
  misc_feature 1..20: note = chemically synthesized
  source 1..20: mol_type = other DNA
ggtgcgtttctggttgtatg

SEQ ID NO: 50674 - DNA, 20 bp, synthetic construct
  misc_feature 1..20: note = chemically synthesized
  source 1..20: mol_type = other DNA
cgtttctggttgtatgagga

SEQ ID NO: 50675 - DNA, 20 bp, synthetic construct
  misc_feature 1..20: note = chemically synthesized
  source 1..20: mol_type = other DNA
tgaggatagttgtattatat

SEQ ID NO: 50676 - DNA, 20 bp, synthetic construct
  misc_feature 1..20: note = chemically synthesized
  source 1..20: mol_type = other DNA
gaggatagttgtattatatt

SEQ ID NO: 50677 - DNA, 20 bp, synthetic construct
  misc_feature 1..20: note = chemically synthesized
  source 1..20: mol_type = other DNA
cttattattgtctttatttg

SEQ ID NO: 50678 - DNA, 20 bp, synthetic construct
  misc_feature 1..20: note = chemically synthesized
  source 1..20: mol_type = other DNA
ttgaagattatgtatgattt

SEQ ID NO: 50679 - DNA, 20 bp, synthetic construct
  misc_feature 1..20: note = chemically synthesized
  source 1..20: mol_type = other DNA
tgaagattatgtatgatttc

SEQ ID NO: 50680 - DNA, 20 bp, synthetic construct
  misc_feature 1..20: note = chemically synthesized
  source 1..20: mol_type = other DNA
atgatttcaggatgtgtgta

SEQ ID NO: 50681 - DNA, 20 bp, synthetic construct
  misc_feature 1..20: note = chemically synthesized
  source 1..20: mol_type = other DNA
tgatttcaggatgtgtgtat

SEQ ID NO: 50682 - DNA, 20 bp, synthetic construct
  misc_feature 1..20: note = chemically synthesized
  source 1..20: mol_type = other DNA
caggatgtgtgtatgggttc

SEQ ID NO: 50683 - DNA, 20 bp, synthetic construct
  misc_feature 1..20: note = chemically synthesized
  source 1..20: mol_type = other DNA
gtgtatgggttcaagttgac

SEQ ID NO: 50684 - DNA, 20 bp, synthetic construct
  misc_feature 1..20: note = chemically synthesized
  source 1..20: mol_type = other DNA
tgtatgggttcaagttgaca

SEQ ID NO: 50685 - DNA, 20 bp, synthetic construct
  misc_feature 1..20: note = chemically synthesized
  source 1..20: mol_type = other DNA
tatgggttcaagttgacaag

SEQ ID NO: 50686 - DNA, 20 bp, synthetic construct
  misc_feature 1..20: note = chemically synthesized
  source 1..20: mol_type = other DNA
ggttcaagttgacaaggagt

SEQ ID NO: 50687 - DNA, 20 bp, synthetic construct
  misc_feature 1..20: note = chemically synthesized
  source 1..20: mol_type = other DNA
acaaggagttggacttgtga

SEQ ID NO: 50688 - DNA, 20 bp, synthetic construct
  misc_feature 1..20: note = chemically synthesized
  source 1..20: mol_type = other DNA
gttaatactgtcaacttgat

SEQ ID NO: 50689 - DNA, 20 bp, synthetic construct
  misc_feature 1..20: note = chemically synthesized
  source 1..20: mol_type = other DNA
tgtcaacttgattggattga

SEQ ID NO: 50690 - DNA, 20 bp, synthetic construct
  misc_feature 1..20: note = chemically synthesized
  source 1..20: mol_type = other DNA
tgattggattgaaagatgca

SEQ ID NO: 50691 - DNA, 20 bp, synthetic construct
  misc_feature 1..20: note = chemically synthesized
  source 1..20: mol_type = other DNA
aagatgcaaagtattaatct

SEQ ID NO: 50692 - DNA, 20 bp, synthetic construct
  misc_feature 1..20: note = chemically synthesized
  source 1..20: mol_type = other DNA
ttaatctcggttatgtctgt

SEQ ID NO: 50693 - DNA, 20 bp, synthetic construct
  misc_feature 1..20: note = chemically synthesized
  source 1..20: mol_type = other DNA
taatctcggttatgtctgtg

SEQ ID NO: 50694 - DNA, 20 bp, synthetic construct
  misc_feature 1..20: note = chemically synthesized
  source 1..20: mol_type = other DNA
aatctcggttatgtctgtga

SEQ ID NO: 50695 - DNA, 20 bp, synthetic construct
  misc_feature 1..20: note = chemically synthesized
  source 1..20: mol_type = other DNA
cggttatgtctgtgagggtg

SEQ ID NO: 50696 - DNA, 20 bp, synthetic construct
  misc_feature 1..20: note = chemically synthesized
  source 1..20: mol_type = other DNA
tgtctgtgagggtgtggcaa

SEQ ID NO: 50697 - DNA, 20 bp, synthetic construct
  misc_feature 1..20: note = chemically synthesized
  source 1..20: mol_type = other DNA
gtctgtgagggtgtggcaaa

SEQ ID NO: 50698 - DNA, 20 bp, synthetic construct
  misc_feature 1..20: note = chemically synthesized
  source 1..20: mol_type = other DNA
ctgtgagggtgtggcaaaag

SEQ ID NO: 50699 - DNA, 20 bp, synthetic construct
  misc_feature 1..20: note = chemically synthesized
  source 1..20: mol_type = other DNA
gcaaaaggagattaacattt

SEQ ID NO: 50700 - DNA, 20 bp, synthetic construct
  misc_feature 1..20: note = chemically synthesized
  source 1..20: mol_type = other DNA
aaggagattaacatttgagt

SEQ ID NO: 50701 - DNA, 20 bp, synthetic construct
  misc_feature 1..20: note = chemically synthesized
  source 1..20: mol_type = other DNA
gagattaacatttgagtcag

SEQ ID NO: 50702 - DNA, 20 bp, synthetic construct
  misc_feature 1..20: note = chemically synthesized
  source 1..20: mol_type = other DNA
agattaacatttgagtcagt

SEQ ID NO: 50703 - DNA, 20 bp, synthetic construct
  misc_feature 1..20: note = chemically synthesized
  source 1..20: mol_type = other DNA
taacatttgagtcagtgggc

SEQ ID NO: 50704 - DNA, 20 bp, synthetic construct
  misc_feature 1..20: note = chemically synthesized
  source 1..20: mol_type = other DNA
aacatttgagtcagtgggct

SEQ ID NO: 50705 - DNA, 20 bp, synthetic construct
  misc_feature 1..20: note = chemically synthesized
  source 1..20: mol_type = other DNA
tgtacacatgcatttagaaa

SEQ ID NO: 50706 - DNA, 20 bp, synthetic construct
  misc_feature 1..20: note = chemically synthesized
  source 1..20: mol_type = other DNA
agtgctgcagctgtccactt

SEQ ID NO: 50707 - DNA, 20 bp, synthetic construct
  misc_feature 1..20: note = chemically synthesized
  source 1..20: mol_type = other DNA
gcaggctgggggagggaagg

SEQ ID NO: 50708 - DNA, 20 bp, synthetic construct
  misc_feature 1..20: note = chemically synthesized
  source 1..20: mol_type = other DNA
gggagggaaggcagggtggc

SEQ ID NO: 50709 - DNA, 20 bp, synthetic construct
  misc_feature 1..20: note = chemically synthesized
  source 1..20: mol_type = other DNA
ctgacccacttcatggctag

SEQ ID NO: 50710 - DNA, 20 bp, synthetic construct
  misc_feature 1..20: note = chemically synthesized
  source 1..20: mol_type = other DNA
caatagctgtctctcaaaag

SEQ ID NO: 50711 - DNA, 20 bp, synthetic construct
  misc_feature 1..20: note = chemically synthesized
  source 1..20: mol_type = other DNA
cactgacacctcaagcacca

SEQ ID NO: 50712 - DNA, 20 bp, synthetic construct
  misc_feature 1..20: note = chemically synthesized
  source 1..20: mol_type = other DNA
ctcaagcaccattggatctg

SEQ ID NO: 50713 - DNA, 20 bp, synthetic construct
  misc_feature 1..20: note = chemically synthesized
  source 1..20: mol_type = other DNA
aggtcactcgataaatgggc

SEQ ID NO: 50714 - DNA, 20 bp, synthetic construct
  misc_feature 1..20: note = chemically synthesized
  source 1..20: mol_type = other DNA
cagagtaacacacccaaacg

SEQ ID NO: 50715 - DNA, 20 bp, synthetic construct
  misc_feature 1..20: note = chemically synthesized
  source 1..20: mol_type = other DNA
aagttatgcttcaccttaga

SEQ ID NO: 50716 - DNA, 20 bp, synthetic construct
  misc_feature 1..20: note = chemically synthesized
  source 1..20: mol_type = other DNA
agaaagtccctaaattttag

SEQ ID NO: 50717 - DNA, 20 bp, synthetic construct
  misc_feature 1..20: note = chemically synthesized
  source 1..20: mol_type = other DNA
tatccaatcatcataatgtc

SEQ ID NO: 50718 - DNA, 20 bp, synthetic construct
  misc_feature 1..20: note = chemically synthesized
  source 1..20: mol_type = other DNA
aagattatgacacaaagctg

SEQ ID NO: 50719 - DNA, 20 bp, synthetic construct
  misc_feature 1..20: note = chemically synthesized
  source 1..20: mol_type = other DNA
gagttgatacacccctgagg

SEQ ID NO: 50720 - DNA, 20 bp, synthetic construct
  misc_feature 1..20: note = chemically synthesized
  source 1..20: mol_type = other DNA
ctgaaggcaaattgcttctg

SEQ ID NO: 50721 - DNA, 20 bp, synthetic construct
  misc_feature 1..20: note = chemically synthesized
  source 1..20: mol_type = other DNA
ttctggtgggtcttatggac

SEQ ID NO: 50722 - DNA, 20 bp, synthetic construct
  misc_feature 1..20: note = chemically synthesized
  source 1..20: mol_type = other DNA
actggtagagcagctgcaat

SEQ ID NO: 50723 - DNA, 20 bp, synthetic construct
  misc_feature 1..20: note = chemically synthesized
  source 1..20: mol_type = other DNA
cctctgcacaggtcaaatgg

SEQ ID NO: 50724 - DNA, 20 bp, synthetic construct
  misc_feature 1..20: note = chemically synthesized
  source 1..20: mol_type = other DNA
gtcaaatgggagagttgaac

SEQ ID NO: 50725 - DNA, 20 bp, synthetic construct
  misc_feature 1..20: note = chemically synthesized
  source 1..20: mol_type = other DNA
gagttgaacagggatgtggt

SEQ ID NO: 50726 - DNA, 20 bp, synthetic construct
  misc_feature 1..20: note = chemically synthesized
  source 1..20: mol_type = other DNA
ctaatcacttcagtccctcc

SEQ ID NO: 50727 - DNA, 20 bp, synthetic construct
  misc_feature 1..20: note = chemically synthesized
  source 1..20: mol_type = other DNA
cacttcagtccctccaggga

SEQ ID NO: 50728 - DNA, 20 bp, synthetic construct
  misc_feature 1..20: note = chemically synthesized
  source 1..20: mol_type = other DNA
tggcactgggaaaatgacca

SEQ ID NO: 50729 - DNA, 20 bp, synthetic construct
  misc_feature 1..20: note = chemically synthesized
  source 1..20: mol_type = other DNA
tggggaaccacaataacgtt

SEQ ID NO: 50730 - DNA, 20 bp, synthetic construct
  misc_feature 1..20: note = chemically synthesized
  source 1..20: mol_type = other DNA
caataacgttttgggtaccc

SEQ ID NO: 50731 - DNA, 20 bp, synthetic construct
  misc_feature 1..20: note = chemically synthesized
  source 1..20: mol_type = other DNA
ggccagaggtctccttaggg

SEQ ID NO: 50732 - DNA, 20 bp, synthetic construct
  misc_feature 1..20: note = chemically synthesized
  source 1..20: mol_type = other DNA
ccttagggaaggatgggaga

SEQ ID NO: 50733 - DNA, 20 bp, synthetic construct
  misc_feature 1..20: note = chemically synthesized
  source 1..20: mol_type = other DNA
ctagtggtgtccttcctcaa

SEQ ID NO: 50734 - DNA, 20 bp, synthetic construct
  misc_feature 1..20: note = chemically synthesized
  source 1..20: mol_type = other DNA
tccagcctccccttcattca

SEQ ID NO: 50735 - DNA, 20 bp, synthetic construct
  misc_feature 1..20: note = chemically synthesized
  source 1..20: mol_type = other DNA
gttctggaactgtaacaggt

SEQ ID NO: 50736 - DNA, 20 bp, synthetic construct
  misc_feature 1..20: note = chemically synthesized
  source 1..20: mol_type = other DNA
tttgtttatataaatcaagt

SEQ ID NO: 50737 - DNA, 20 bp, synthetic construct
  misc_feature 1..20: note = chemically synthesized
  source 1..20: mol_type = other DNA
agccaatgccagagctctac

SEQ ID NO: 50738 - DNA, 20 bp, synthetic construct
  misc_feature 1..20: note = chemically synthesized
  source 1..20: mol_type = other DNA
acacttggcccctgccacct

SEQ ID NO: 50739 - DNA, 20 bp, synthetic construct
  misc_feature 1..20: note = chemically synthesized
  source 1..20: mol_type = other DNA
attgtatttaaattttgtag

SEQ ID NO: 50740 - DNA, 20 bp, synthetic construct
  misc_feature 1..20: note = chemically synthesized
  source 1..20: mol_type = other DNA
tatttcacaaagcttcggcc

SEQ ID NO: 50741 - DNA, 20 bp, synthetic construct
  misc_feature 1..20: note = chemically synthesized
  source 1..20: mol_type = other DNA
atcttctggaccctcccagc

SEQ ID NO: 50742 - DNA, 20 bp, synthetic construct
  misc_feature 1..20: note = chemically synthesized
  source 1..20: mol_type = other DNA
tctggaccctcccagctggg

SEQ ID NO: 50743 - DNA, 20 bp, synthetic construct
  misc_feature 1..20: note = chemically synthesized
  source 1..20: mol_type = other DNA
atcctaatctccctaagcct

SEQ ID NO: 50744 - DNA, 20 bp, synthetic construct
  misc_feature 1..20: note = chemically synthesized
  source 1..20: mol_type = other DNA
tttttttttttttttggaaa

SEQ ID NO: 50745 - DNA, 20 bp, synthetic construct
  misc_feature 1..20: note = chemically synthesized
  source 1..20: mol_type = other DNA
gtcttgctctgttaccaggc

SEQ ID NO: 50746 - DNA, 20 bp, synthetic construct
  misc_feature 1..20: note = chemically synthesized
  source 1..20: mol_type = other DNA
ttttgtatttttagcagaga

SEQ ID NO: 50747 - DNA, 20 bp, synthetic construct
  misc_feature 1..20: note = chemically synthesized
  source 1..20: mol_type = other DNA
tggggtttcaccattttagc

SEQ ID NO: 50748 - DNA, 20 bp, synthetic construct
  misc_feature 1..20: note = chemically synthesized
  source 1..20: mol_type = other DNA
gcccccgcctcccaaggtgc

SEQ ID NO: 50749 - DNA, 20 bp, synthetic construct
  misc_feature 1..20: note = chemically synthesized
  source 1..20: mol_type = other DNA
ccgagctgcaacattaaatg

SEQ ID NO: 50750 - DNA, 20 bp, synthetic construct
  misc_feature 1..20: note = chemically synthesized
  source 1..20: mol_type = other DNA
gaaagcttaagcagttcttt

SEQ ID NO: 50751 - DNA, 20 bp, synthetic construct
  misc_feature 1..20: note = chemically synthesized
  source 1..20: mol_type = other DNA
agagtataatgcacctcctc

SEQ ID NO: 50752 - DNA, 20 bp, synthetic construct
  misc_feature 1..20: note = chemically synthesized
  source 1..20: mol_type = other DNA
cctcacctctggggcccgca

SEQ ID NO: 50753 - DNA, 20 bp, synthetic construct
  misc_feature 1..20: note = chemically synthesized
  source 1..20: mol_type = other DNA
tagaagcattcaggggcatt

SEQ ID NO: 50754 - DNA, 20 bp, synthetic construct
  misc_feature 1..20: note = chemically synthesized
  source 1..20: mol_type = other DNA
cattaggggtgcctcttgag

SEQ ID NO: 50755 - DNA, 20 bp, synthetic construct
  misc_feature 1..20: note = chemically synthesized
  source 1..20: mol_type = other DNA
cactgttgcctcaagcagtg

SEQ ID NO: 50756 - DNA, 20 bp, synthetic construct
  misc_feature 1..20: note = chemically synthesized
  source 1..20: mol_type = other DNA
gtggaaaggctaatggcagc

SEQ ID NO: 50757 - DNA, 20 bp, synthetic construct
  misc_feature 1..20: note = chemically synthesized
  source 1..20: mol_type = other DNA
atggcagcacgggtcaggga

SEQ ID NO: 50758 - DNA, 20 bp, synthetic construct
  misc_feature 1..20: note = chemically synthesized
  source 1..20: mol_type = other DNA
gaggggatgttaccactact

SEQ ID NO: 50759 - DNA, 20 bp, synthetic construct
  misc_feature 1..20: note = chemically synthesized
  source 1..20: mol_type = other DNA
ttctggcaaaaaagtttcat

SEQ ID NO: 50760 - DNA, 20 bp, synthetic construct
  misc_feature 1..20: note = chemically synthesized
  source 1..20: mol_type = other DNA
ctcagtgtcctcagcttcat

SEQ ID NO: 50761 - DNA, 20 bp, synthetic construct
  misc_feature 1..20: note = chemically synthesized
  source 1..20: mol_type = other DNA
cacatccccactccaagttc

SEQ ID NO: 50762 - DNA, 20 bp, synthetic construct
  misc_feature 1..20: note = chemically synthesized
  source 1..20: mol_type = other DNA
aatttcaactctttctctac

SEQ ID NO: 50763 - DNA, 20 bp, synthetic construct
  misc_feature 1..20: note = chemically synthesized
  source 1..20: mol_type = other DNA
atagtcaaaggtattatgta

SEQ ID NO: 50764 - DNA, 20 bp, synthetic construct
  misc_feature 1..20: note = chemically synthesized
  source 1..20: mol_type = other DNA
ctccttgcctctcataagtg

SEQ ID NO: 50765 - DNA, 20 bp, synthetic construct
  misc_feature 1..20: note = chemically synthesized
  source 1..20: mol_type = other DNA
gttctccatactattagaag

SEQ ID NO: 50766 - DNA, 20 bp, synthetic construct
  misc_feature 1..20: note = chemically synthesized
  source 1..20: mol_type = other DNA
agaagtcccaaaaccaatga

SEQ ID NO: 50767 - DNA, 20 bp, synthetic construct
  misc_feature 1..20: note = chemically synthesized
  source 1..20: mol_type = other DNA
gtatgaaaatctgtattagt

SEQ ID NO: 50768 - DNA, 20 bp, synthetic construct
  misc_feature 1..20: note = chemically synthesized
  source 1..20: mol_type = other DNA
atatatgagagagagagaga

SEQ ID NO: 50769 - DNA, 20 bp, synthetic construct
  misc_feature 1..20: note = chemically synthesized
  source 1..20: mol_type = other DNA
tgtatatatgtgtatatata

SEQ ID NO: 50770 - DNA, 20 bp, synthetic construct
  misc_feature 1..20: note = chemically synthesized
  source 1..20: mol_type = other DNA
agtcccacagctgaagaact

SEQ ID NO: 50771 - DNA, 20 bp, synthetic construct
  misc_feature 1..20: note = chemically synthesized
  source 1..20: mol_type = other DNA
gtccgatgttcaagagcagg

SEQ ID NO: 50772 - DNA, 20 bp, synthetic construct
  misc_feature 1..20: note = chemically synthesized
  source 1..20: mol_type = other DNA
ggcagcaggggcaggggcct

SEQ ID NO: 50773 - DNA, 20 bp, synthetic construct
  misc_feature 1..20: note = chemically synthesized
  source 1..20: mol_type = other DNA
aggggcctcagggtgcttgc

SEQ ID NO: 50774 - DNA, 20 bp, synthetic construct
  misc_feature 1..20: note = chemically synthesized
  source 1..20: mol_type = other DNA
acacactggcctcttttcca

SEQ ID NO: 50775 - DNA, 20 bp, synthetic construct
  misc_feature 1..20: note = chemically synthesized
  source 1..20: mol_type = other DNA
atagggtggctggggcacac

SEQ ID NO: 50776 - DNA, 20 bp, synthetic construct
  misc_feature 1..20: note = chemically synthesized
  source 1..20: mol_type = other DNA
tggctggggcacactggggt

SEQ ID NO: 50777 - DNA, 20 bp, synthetic construct
  misc_feature 1..20: note = chemically synthesized
  source 1..20: mol_type = other DNA
tggggtgtgagtaaagcact

SEQ ID NO: 50778 - DNA, 20 bp, synthetic construct
  misc_feature 1..20: note = chemically synthesized
  source 1..20: mol_type = other DNA
agcttcaccccacaaaaaca

SEQ ID NO: 50779 - DNA, 20 bp, synthetic construct
  misc_feature 1..20: note = chemically synthesized
  source 1..20: mol_type = other DNA
cagccagtggaaatgttcaa

SEQ ID NO: 50780 - DNA, 20 bp, synthetic construct
  misc_feature 1..20: note = chemically synthesized
  source 1..20: mol_type = other DNA
gccaggagccttgcctggtg

SEQ ID NO: 50781 - DNA, 20 bp, synthetic construct
  misc_feature 1..20: note = chemically synthesized
  source 1..20: mol_type = other DNA
agctcacaagaaagagaaac

SEQ ID NO: 50782 - DNA, 20 bp, synthetic construct
  misc_feature 1..20: note = chemically synthesized
  source 1..20: mol_type = other DNA
gctgaaatggcagaggggct

SEQ ID NO: 50783 - DNA, 20 bp, synthetic construct
  misc_feature 1..20: note = chemically synthesized
  source 1..20: mol_type = other DNA
gaggggctgtgggttgtctc

SEQ ID NO: 50784 - DNA, 20 bp, synthetic construct
  misc_feature 1..20: note = chemically synthesized
  source 1..20: mol_type = other DNA
ctaaaatgttcaggcagggc

SEQ ID NO: 50785 - DNA, 20 bp, synthetic construct
  misc_feature 1..20: note = chemically synthesized
  source 1..20: mol_type = other DNA
tggctgtgctctgcccagtg

SEQ ID NO: 50786 - DNA, 20 bp, synthetic construct
  misc_feature 1..20: note = chemically synthesized
  source 1..20: mol_type = other DNA
acactgtgctggaggtccgt

SEQ ID NO: 50787 - DNA, 20 bp, synthetic construct
  misc_feature 1..20: note = chemically synthesized
  source 1..20: mol_type = other DNA
tgagcccatactttaatctc

SEQ ID NO: 50788 - DNA, 20 bp, synthetic construct
  misc_feature 1..20: note = chemically synthesized
  source 1..20: mol_type = other DNA
gtggtaaggaagaaagtaca

SEQ ID NO: 50789 - DNA, 20 bp, synthetic construct
  misc_feature 1..20: note = chemically synthesized
  source 1..20: mol_type = other DNA
caatattgcaaatcattatt

SEQ ID NO: 50790 - DNA, 20 bp, synthetic construct
  misc_feature 1..20: note = chemically synthesized
  source 1..20: mol_type = other DNA
ctgtgatacaggtgtttgat

SEQ ID NO: 50791 - DNA, 20 bp, synthetic construct
  misc_feature 1..20: note = chemically synthesized
  source 1..20: mol_type = other DNA
actgcaaccgtgtatctctt

SEQ ID NO: 50792 - DNA, 20 bp, synthetic construct
  misc_feature 1..20: note = chemically synthesized
  source 1..20: mol_type = other DNA
tcatgtctagcatgcaggac

SEQ ID NO: 50793 - DNA, 20 bp, synthetic construct
  misc_feature 1..20: note = chemically synthesized
  source 1..20: mol_type = other DNA
tgcaggacttgggtaatctc

SEQ ID NO: 50794 - DNA, 20 bp, synthetic construct
  misc_feature 1..20: note = chemically synthesized
  source 1..20: mol_type = other DNA
ctaaccataaaatcttaaat

SEQ ID NO: 50795 - DNA, 20 bp, synthetic construct
  misc_feature 1..20: note = chemically synthesized
  source 1..20: mol_type = other DNA
tgacagttgataagcatctt

SEQ ID NO: 50796 - DNA, 20 bp, synthetic construct
  misc_feature 1..20: note = chemically synthesized
  source 1..20: mol_type = other DNA
agttacaaaaatgttggtgc

SEQ ID NO: 50797 - DNA, 20 bp, synthetic construct
  misc_feature 1..20: note = chemically synthesized
  source 1..20: mol_type = other DNA
gttggtgcatggatgatgtt

SEQ ID NO: 50798 - DNA, 20 bp, synthetic construct
  misc_feature 1..20: note = chemically synthesized
  source 1..20: mol_type = other DNA
aattaagcaaaaaaaaaatg

SEQ ID NO: 50799 - DNA, 20 bp, synthetic construct
  misc_feature 1..20: note = chemically synthesized
  source 1..20: mol_type = other DNA
acacaccactattagttggg

SEQ ID NO: 50800 - DNA, 20 bp, synthetic construct
  misc_feature 1..20: note = chemically synthesized
  source 1..20: mol_type = other DNA
ctttctgcctggttgtggca

SEQ ID NO: 50801 - DNA, 20 bp, synthetic construct
  misc_feature 1..20: note = chemically synthesized
  source 1..20: mol_type = other DNA
acaaaatgtagtgattttca

SEQ ID NO: 50802 - DNA, 20 bp, synthetic construct
  misc_feature 1..20: note = chemically synthesized
  source 1..20: mol_type = other DNA
tgaagatagccaagcttcca

SEQ ID NO: 50803 - DNA, 20 bp, synthetic construct
  misc_feature 1..20: note = chemically synthesized
  source 1..20: mol_type = other DNA
ggacaaccttgaccactttg

SEQ ID NO: 50804 - DNA, 20 bp, synthetic construct
  misc_feature 1..20: note = chemically synthesized
  source 1..20: mol_type = other DNA
tggtgggggccacatgcaga

SEQ ID NO: 50805 - DNA, 20 bp, synthetic construct
  misc_feature 1..20: note = chemically synthesized
  source 1..20: mol_type = other DNA
gggggccacatgcagatgga

SEQ ID NO: 50806 - DNA, 20 bp, synthetic construct
  misc_feature 1..20: note = chemically synthesized
  source 1..20: mol_type = other DNA
catgcagatggagtgggtta

SEQ ID NO: 50807 - DNA, 20 bp, synthetic construct
  misc_feature 1..20: note = chemically synthesized
  source 1..20: mol_type = other DNA
agagtgactagaagagcagt

SEQ ID NO: 50808 - DNA, 20 bp, synthetic construct
  misc_feature 1..20: note = chemically synthesized
  source 1..20: mol_type = other DNA
tgaaagcagcgagacttcta

SEQ ID NO: 50809 - DNA, 20 bp, synthetic construct
  misc_feature 1..20: note = chemically synthesized
  source 1..20: mol_type = other DNA
agcgagacttctagggaata

SEQ ID NO: 50810 - DNA, 20 bp, synthetic construct
  misc_feature 1..20: note = chemically synthesized
  source 1..20: mol_type = other DNA
aaggcctgtcctgacctcct

SEQ ID NO: 50811 - DNA, 20 bp, synthetic construct
  misc_feature 1..20: note = chemically synthesized
  source 1..20: mol_type = other DNA
catgagggcagggcaaggag

SEQ ID NO: 50812 - DNA, 20 bp, synthetic construct
  misc_feature 1..20: note = chemically synthesized
  source 1..20: mol_type = other DNA
atatgctctatgctggaaaa

SEQ ID NO: 50813 - DNA, 20 bp, synthetic construct
  misc_feature 1..20: note = chemically synthesized
  source 1..20: mol_type = other DNA
tttgaactctcttttccagg

SEQ ID NO: 50814 - DNA, 20 bp, synthetic construct
  misc_feature 1..20: note = chemically synthesized
  source 1..20: mol_type = other DNA
ttttccaggaagagttgtgc

SEQ ID NO: 50815 - DNA, 20 bp, synthetic construct
  misc_feature 1..20: note = chemically synthesized
  source 1..20: mol_type = other DNA
ttaataaggtgcttcctaca

SEQ ID NO: 50816 - DNA, 20 bp, synthetic construct
  misc_feature 1..20: note = chemically synthesized
  source 1..20: mol_type = other DNA
gagttcagttaaacattttg

SEQ ID NO: 50817 - DNA, 20 bp, synthetic construct
  misc_feature 1..20: note = chemically synthesized
  source 1..20: mol_type = other DNA
tgctaggaaatatcccaaaa

SEQ ID NO: 50818 - DNA, 20 bp, synthetic construct
  misc_feature 1..20: note = chemically synthesized
  source 1..20: mol_type = other DNA
tccagggctcatatggcaat

SEQ ID NO: 50819 - DNA, 20 bp, synthetic construct
  misc_feature 1..20: note = chemically synthesized
  source 1..20: mol_type = other DNA
atatggcaatggggatttaa

SEQ ID NO: 50820 - DNA, 20 bp, synthetic construct
  misc_feature 1..20: note = chemically synthesized
  source 1..20: mol_type = other DNA
atgtattttattaatggtgt

SEQ ID NO: 50821 - DNA, 20 bp, synthetic construct
  misc_feature 1..20: note = chemically synthesized
  source 1..20: mol_type = other DNA
tttcttcctcactgtggtgt

SEQ ID NO: 50822 - DNA, 20 bp, synthetic construct
  misc_feature 1..20: note = chemically synthesized
  source 1..20: mol_type = other DNA
tgtaaaagacttagcaattt

SEQ ID NO: 50823 - DNA, 20 bp, synthetic construct
  misc_feature 1..20: note = chemically synthesized
  source 1..20: mol_type = other DNA
ctttccaaaagagcttatca

SEQ ID NO: 50824 - DNA, 20 bp, synthetic construct
  misc_feature 1..20: note = chemically synthesized
  source 1..20: mol_type = other DNA
agagaagtttgttctagcct

SEQ ID NO: 50825 - DNA, 20 bp, synthetic construct
  misc_feature 1..20: note = chemically synthesized
  source 1..20: mol_type = other DNA
tagcctttgggtgtagcctg

SEQ ID NO: 50826 - DNA, 20 bp, synthetic construct
  misc_feature 1..20: note = chemically synthesized
  source 1..20: mol_type = other DNA
ctagtttccatgggctgaaa

SEQ ID NO: 50827 - DNA, 20 bp, synthetic construct
  misc_feature 1..20: note = chemically synthesized
  source 1..20: mol_type = other DNA
gtattttctttgatattttc

SEQ ID NO: 50828 - DNA, 20 bp, synthetic construct
  misc_feature 1..20: note = chemically synthesized
  source 1..20: mol_type = other DNA
tgtgcttcaagatggaactc

SEQ ID NO: 50829 - DNA, 20 bp, synthetic construct
  misc_feature 1..20: note = chemically synthesized
  source 1..20: mol_type = other DNA
ggcaactgctcaactacctg

SEQ ID NO: 50830 - DNA, 20 bp, synthetic construct
  misc_feature 1..20: note = chemically synthesized
  source 1..20: mol_type = other DNA
gcccaagctagcatggaccc

SEQ ID NO: 50831 - DNA, 20 bp, synthetic construct
  misc_feature 1..20: note = chemically synthesized
  source 1..20: mol_type = other DNA
ccagacttctctcttcttaa

SEQ ID NO: 50832 - DNA, 20 bp, synthetic construct
  misc_feature 1..20: note = chemically synthesized
  source 1..20: mol_type = other DNA
aacctgctcttcagttacat

SEQ ID NO: 50833 - DNA, 20 bp, synthetic construct
  misc_feature 1..20: note = chemically synthesized
  source 1..20: mol_type = other DNA
tttctttatttccttgattt

SEQ ID NO: 50834 - DNA, 20 bp, synthetic construct
  misc_feature 1..20: note = chemically synthesized
  source 1..20: mol_type = other DNA
gatttctttgtttataaaat

SEQ ID NO: 50835 - DNA, 20 bp, synthetic construct
  misc_feature 1..20: note = chemically synthesized
  source 1..20: mol_type = other DNA
taacccactcaacaaatacc

SEQ ID NO: 50836 - DNA, 20 bp, synthetic construct
  misc_feature 1..20: note = chemically synthesized
  source 1..20: mol_type = other DNA
acaaataccctgagtatttg

SEQ ID NO: 50837 - DNA, 20 bp, synthetic construct
  misc_feature 1..20: note = chemically synthesized
  source 1..20: mol_type = other DNA
atgcgtatatcatctggcaa

SEQ ID NO: 50838 - DNA, 20 bp, synthetic construct
  misc_feature 1..20: note = chemically synthesized
  source 1..20: mol_type = other DNA
tggatgtgtataatttctcc

SEQ ID NO: 50839 - DNA, 20 bp, synthetic construct
  misc_feature 1..20: note = chemically synthesized
  source 1..20: mol_type = other DNA
ccataacaaagagagaaatg

SEQ ID NO: 50840 - DNA, 20 bp, synthetic construct
  misc_feature 1..20: note = chemically synthesized
  source 1..20: mol_type = other DNA
caaggaaccaaacatattca

SEQ ID NO: 50841 - DNA, 20 bp, synthetic construct
  misc_feature 1..20: note = chemically synthesized
  source 1..20: mol_type = other DNA
gaaattaaacttattttttt

SEQ ID NO: 50842 - DNA, 20 bp, synthetic construct
  misc_feature 1..20: note = chemically synthesized
  source 1..20: mol_type = other DNA
catatacaagattttgaact

SEQ ID NO: 50843 - DNA, 20 bp, synthetic construct
  misc_feature 1..20: note = chemically synthesized
  source 1..20: mol_type = other DNA
gattttgaactgggaatttc

SEQ ID NO: 50844 - DNA, 20 bp, synthetic construct
  misc_feature 1..20: note = chemically synthesized
  source 1..20: mol_type = other DNA
tttcatgaatcaaaaattaa

SEQ ID NO: 50845 - DNA, 20 bp, synthetic construct
  misc_feature 1..20: note = chemically synthesized
  source 1..20: mol_type = other DNA
aggacattgttgacttacat

SEQ ID NO: 50846 - DNA, 20 bp, synthetic construct
  misc_feature 1..20: note = chemically synthesized
  source 1..20: mol_type = other DNA
gacccatgccactggctcag

SEQ ID NO: 50847 - DNA, 20 bp, synthetic construct
  misc_feature 1..20: note = chemically synthesized
  source 1..20: mol_type = other DNA
agcagggttcaaacattacc

SEQ ID NO: 50848 - DNA, 20 bp, synthetic construct
  misc_feature 1..20: note = chemically synthesized
  source 1..20: mol_type = other DNA
ttcaaacattaccttgaata

SEQ ID NO: 50849 - DNA, 20 bp, synthetic construct
  misc_feature 1..20: note = chemically synthesized
  source 1..20: mol_type = other DNA
tagagtcttataaaatattt

SEQ ID NO: 50850 - DNA, 20 bp, synthetic construct
  misc_feature 1..20: note = chemically synthesized
  source 1..20: mol_type = other DNA
cttctttcattctctttctt

SEQ ID NO: 50851 - DNA, 20 bp, synthetic construct
  misc_feature 1..20: note = chemically synthesized
  source 1..20: mol_type = other DNA
ccgaggttgtgtcgctaccc

SEQ ID NO: 50852 - DNA, 20 bp, synthetic construct
  misc_feature 1..20: note = chemically synthesized
  source 1..20: mol_type = other DNA
agatatcaatccttccagga

SEQ ID NO: 50853 - DNA, 20 bp, synthetic construct
  misc_feature 1..20: note = chemically synthesized
  source 1..20: mol_type = other DNA
attttgggaggccacggcag

SEQ ID NO: 50854 - DNA, 20 bp, synthetic construct
  misc_feature 1..20: note = chemically synthesized
  source 1..20: mol_type = other DNA
cagatggatcacctgaggcc

SEQ ID NO: 50855 - DNA, 20 bp, synthetic construct
  misc_feature 1..20: note = chemically synthesized
  source 1..20: mol_type = other DNA
acaaaaaatacaaaaattag

SEQ ID NO: 50856 - DNA, 20 bp, synthetic construct
  misc_feature 1..20: note = chemically synthesized
  source 1..20: mol_type = other DNA
tactaagtaggctgaggcac

SEQ ID NO: 50857 - DNA, 20 bp, synthetic construct
  misc_feature 1..20: note = chemically synthesized
  source 1..20: mol_type = other DNA
gatggaggttgcagtgagcc

SEQ ID NO: 50858 - DNA, 20 bp, synthetic construct
  misc_feature 1..20: note = chemically synthesized
  source 1..20: mol_type = other DNA
atgtgccactgcactccagc

SEQ ID NO: 50859 - DNA, 20 bp, synthetic construct
  misc_feature 1..20: note = chemically synthesized
  source 1..20: mol_type = other DNA
tccagcctgggtgacagagc

SEQ ID NO: 50860 - DNA, 20 bp, synthetic construct
  misc_feature 1..20: note = chemically synthesized
  source 1..20: mol_type = other DNA
atatttttaaaaataaaaca

SEQ ID NO: 50861 - DNA, 20 bp, synthetic construct
  misc_feature 1..20: note = chemically synthesized
  source 1..20: mol_type = other DNA
tttaaaaataaaacataggg

SEQ ID NO: 50862 - DNA, 20 bp, synthetic construct
  misc_feature 1..20: note = chemically synthesized
  source 1..20: mol_type = other DNA
actttgggaggccaagacag

SEQ ID NO: 50863 - DNA, 20 bp, synthetic construct
  misc_feature 1..20: note = chemically synthesized
  source 1..20: mol_type = other DNA
gacaggtggatcacaaggtc

SEQ ID NO: 50864 - DNA, 20 bp, synthetic construct
  misc_feature 1..20: note = chemically synthesized
  source 1..20: mol_type = other DNA
atcccagctactagggaggc

SEQ ID NO: 50865 - DNA, 20 bp, synthetic construct
  misc_feature 1..20: note = chemically synthesized
  source 1..20: mol_type = other DNA
tcacgtcagtgcacttcaac

SEQ ID NO: 50866 - DNA, 20 bp, synthetic construct
  misc_feature 1..20: note = chemically synthesized
  source 1..20: mol_type = other DNA
cagtgcacttcaaccggggt

SEQ ID NO: 50867 - DNA, 20 bp, synthetic construct
  misc_feature 1..20: note = chemically synthesized
  source 1..20: mol_type = other DNA
tagtatcaatctttccgcaa

SEQ ID NO: 50868 - DNA, 20 bp, synthetic construct
  misc_feature 1..20: note = chemically synthesized
  source 1..20: mol_type = other DNA
tcgttctcatgaagtaaagc

SEQ ID NO: 50869 - DNA, 20 bp, synthetic construct
  misc_feature 1..20: note = chemically synthesized
  source 1..20: mol_type = other DNA
atgaagtaaagcaagagtgg

SEQ ID NO: 50870 - DNA, 20 bp, synthetic construct
  misc_feature 1..20: note = chemically synthesized
  source 1..20: mol_type = other DNA
gagtggtagaattaagtgga

SEQ ID NO: 50871 - DNA, 20 bp, synthetic construct
  misc_feature 1..20: note = chemically synthesized
  source 1..20: mol_type = other DNA
tggccaccgggacaccccag

SEQ ID NO: 50872 - DNA, 20 bp, synthetic construct
  misc_feature 1..20: note = chemically synthesized
  source 1..20: mol_type = other DNA
caccgggacaccccaggagg

SEQ ID NO: 50873 - DNA, 20 bp, synthetic construct
  misc_feature 1..20: note = chemically synthesized
  source 1..20: mol_type = other DNA
tcaagccccaagaagtcccc

SEQ ID NO: 50874 - DNA, 20 bp, synthetic construct
  misc_feature 1..20: note = chemically synthesized
  source 1..20: mol_type = other DNA
aagaagtccccttggatgat

SEQ ID NO: 50875 - DNA, 20 bp, synthetic construct
  misc_feature 1..20: note = chemically synthesized
  source 1..20: mol_type = other DNA
atacatttgggacagatcta

SEQ ID NO: 50876 - DNA, 20 bp, synthetic construct
  misc_feature 1..20: note = chemically synthesized
  source 1..20: mol_type = other DNA
tttctgagcaacacttagac

SEQ ID NO: 50877 - DNA, 20 bp, synthetic construct
  misc_feature 1..20: note = chemically synthesized
  source 1..20: mol_type = other DNA
ttccattgattaaatcctac

SEQ ID NO: 50878 - DNA, 20 bp, synthetic construct
  misc_feature 1..20: note = chemically synthesized
  source 1..20: mol_type = other DNA
aatgcccagcacagagctca

SEQ ID NO: 50879 - DNA, 20 bp, synthetic construct
  misc_feature 1..20: note = chemically synthesized
  source 1..20: mol_type = other DNA
gccagactctctgaaccctg

SEQ ID NO: 50880 - DNA, 20 bp, synthetic construct
  misc_feature 1..20: note = chemically synthesized
  source 1..20: mol_type = other DNA
ggagagtgtaaacgtcatat

SEQ ID NO: 50881 - DNA, 20 bp, synthetic construct
  misc_feature 1..20: note = chemically synthesized
  source 1..20: mol_type = other DNA
agagtctatgttccaaaaac

SEQ ID NO: 50882 - DNA, 20 bp, synthetic construct
  misc_feature 1..20: note = chemically synthesized
  source 1..20: mol_type = other DNA
tctttgcttttaaaaccata

SEQ ID NO: 50883 - DNA, 20 bp, synthetic construct
  misc_feature 1..20: note = chemically synthesized
  source 1..20: mol_type = other DNA
taaagaataatgtttaaatg

SEQ ID NO: 50884 - DNA, 20 bp, synthetic construct
  misc_feature 1..20: note = chemically synthesized
  source 1..20: mol_type = other DNA
ttttcactcaacattacata

SEQ ID NO: 50885 - DNA, 20 bp, synthetic construct
  misc_feature 1..20: note = chemically synthesized
  source 1..20: mol_type = other DNA
atgagcatgaggtttccttt

SEQ ID NO: 50886 - DNA, 20 bp, synthetic construct
  misc_feature 1..20: note = chemically synthesized
  source 1..20: mol_type = other DNA
gatgatggttgcacaccact

SEQ ID NO: 50887 - DNA, 20 bp, synthetic construct
  misc_feature 1..20: note = chemically synthesized
  source 1..20: mol_type = other DNA
tacattttattgcaataaaa

SEQ ID NO: 50888 - DNA, 20 bp, synthetic construct
  misc_feature 1..20: note = chemically synthesized
  source 1..20: mol_type = other DNA
ttgtctagttcaacctgagc

SEQ ID NO: 50889 - DNA, 20 bp, synthetic construct
  misc_feature 1..20: note = chemically synthesized
  source 1..20: mol_type = other DNA
tcaacctgagcctgggtctg

SEQ ID NO: 50890 - DNA, 20 bp, synthetic construct
  misc_feature 1..20: note = chemically synthesized
  source 1..20: mol_type = other DNA
aatcacttcaccacacttgt

SEQ ID NO: 50891 - DNA, 20 bp, synthetic construct
  misc_feature 1..20: note = chemically synthesized
  source 1..20: mol_type = other DNA
atacttctttgacaatttgg

SEQ ID NO: 50892 - DNA, 20 bp, synthetic construct
  misc_feature 1..20: note = chemically synthesized
  source 1..20: mol_type = other DNA
ttttccagatggacacaccc

SEQ ID NO: 50893 - DNA, 20 bp, synthetic construct
  misc_feature 1..20: note = chemically synthesized
  source 1..20: mol_type = other DNA
tttgcaagcccagctttcat

SEQ ID NO: 50894 - DNA, 20 bp, synthetic construct
  misc_feature 1..20: note = chemically synthesized
  source 1..20: mol_type = other DNA
ttcagaaacctgactgcatc

SEQ ID NO: 50895 - DNA, 20 bp, synthetic construct
  misc_feature 1..20: note = chemically synthesized
  source 1..20: mol_type = other DNA
tgactaccaagcatcgggca

SEQ ID NO: 50896 - DNA, 20 bp, synthetic construct
  misc_feature 1..20: note = chemically synthesized
  source 1..20: mol_type = other DNA
tgtgagggagcaccgttctc

SEQ ID NO: 50897 - DNA, 20 bp, synthetic construct
  misc_feature 1..20: note = chemically synthesized
  source 1..20: mol_type = other DNA
caggaaagttgatgtggtct

SEQ ID NO: 50898 - DNA, 20 bp, synthetic construct
  misc_feature 1..20: note = chemically synthesized
  source 1..20: mol_type = other DNA
aggtaggccacaggtgacaa

SEQ ID NO: 50899 - DNA, 20 bp, synthetic construct
  misc_feature 1..20: note = chemically synthesized
  source 1..20: mol_type = other DNA
gggccttggggagagggcag

SEQ ID NO: 50900 - DNA, 20 bp, synthetic construct
  misc_feature 1..20: note = chemically synthesized
  source 1..20: mol_type = other DNA
cagcagggtaagtccagcgg

SEQ ID NO: 50901 - DNA, 20 bp, synthetic construct
  misc_feature 1..20: note = chemically synthesized
  source 1..20: mol_type = other DNA
gcaggatcagtccattgatt

SEQ ID NO: 50902 - DNA, 20 bp, synthetic construct
  misc_feature 1..20: note = chemically synthesized
  source 1..20: mol_type = other DNA
tagaaaattgatgaacaggc

SEQ ID NO: 50903 - DNA, 20 bp, synthetic construct
  misc_feature 1..20: note = chemically synthesized
  source 1..20: mol_type = other DNA
catggtctagttagtgttct

SEQ ID NO: 50904 - DNA, 20 bp, synthetic construct
  misc_feature 1..20: note = chemically synthesized
  source 1..20: mol_type = other DNA
ggcgaggcagaagcctagtg

SEQ ID NO: 50905 - DNA, 20 bp, synthetic construct
  misc_feature 1..20: note = chemically synthesized
  source 1..20: mol_type = other DNA
gggatggtggttagaaatgt

SEQ ID NO: 50906 - DNA, 20 bp, synthetic construct
  misc_feature 1..20: note = chemically synthesized
  source 1..20: mol_type = other DNA
ggtaataattgtgatggtgg

SEQ ID NO: 50907 - DNA, 20 bp, synthetic construct
  misc_feature 1..20: note = chemically synthesized
  source 1..20: mol_type = other DNA
gaatgatgatgatggtggtg

SEQ ID NO: 50908 - DNA, 20 bp, synthetic construct
  misc_feature 1..20: note = chemically synthesized
  source 1..20: mol_type = other DNA
gatgataatggtgatggtgg

SEQ ID NO: 50909 - DNA, 20 bp, synthetic construct
  misc_feature 1..20: note = chemically synthesized
  source 1..20: mol_type = other DNA
atggtggtggtgatgatgtt

SEQ ID NO: 50910 - DNA, 20 bp, synthetic construct
  misc_feature 1..20: note = chemically synthesized
  source 1..20: mol_type = other DNA
ggtaatgataatggtgatgg

SEQ ID NO: 50911 - DNA, 20 bp, synthetic construct
  misc_feature 1..20: note = chemically synthesized
  source 1..20: mol_type = other DNA
tggaatgatggtgatggtgg

SEQ ID NO: 50912 - DNA, 20 bp, synthetic construct
  misc_feature 1..20: note = chemically synthesized
  source 1..20: mol_type = other DNA
gtggaatgatgatggtggtg

SEQ ID NO: 50913 - DNA, 20 bp, synthetic construct
  misc_feature 1..20: note = chemically synthesized
  source 1..20: mol_type = other DNA
gtgatgatggtgatgatgtt

SEQ ID NO: 50914 - DNA, 20 bp, synthetic construct
  misc_feature 1..20: note = chemically synthesized
  source 1..20: mol_type = other DNA
gtttccaggtgttccctgac

SEQ ID NO: 50915 - DNA, 20 bp, synthetic construct
  misc_feature 1..20: note = chemically synthesized
  source 1..20: mol_type = other DNA
tccctgacttggatcaaatg

SEQ ID NO: 50916 - DNA, 20 bp, synthetic construct
  misc_feature 1..20: note = chemically synthesized
  source 1..20: mol_type = other DNA
tttggaggtgttgaggccaa

SEQ ID NO: 50917 - DNA, 20 bp, synthetic construct
  misc_feature 1..20: note = chemically synthesized
  source 1..20: mol_type = other DNA
tgacatctctatgtcggcca

SEQ ID NO: 50918 - DNA, 20 bp, synthetic construct
  misc_feature 1..20: note = chemically synthesized
  source 1..20: mol_type = other DNA
cggtaggttttcaccattat

SEQ ID NO: 50919 - DNA, 20 bp, synthetic construct
  misc_feature 1..20: note = chemically synthesized
  source 1..20: mol_type = other DNA
gattgagctgagctggcctc

SEQ ID NO: 50920 - DNA, 20 bp, synthetic construct
  misc_feature 1..20: note = chemically synthesized
  source 1..20: mol_type = other DNA
aggctctgggggaagaaaga

SEQ ID NO: 50921 - DNA, 20 bp, synthetic construct
  misc_feature 1..20: note = chemically synthesized
  source 1..20: mol_type = other DNA
ctgtgccatgctcgcaaagc

SEQ ID NO: 50922 - DNA, 20 bp, synthetic construct
  misc_feature 1..20: note = chemically synthesized
  source 1..20: mol_type = other DNA
gggcttgcaaaattagaaaa

SEQ ID NO: 50923 - DNA, 20 bp, synthetic construct
  misc_feature 1..20: note = chemically synthesized
  source 1..20: mol_type = other DNA
gtgagaacactgaaacatcc

SEQ ID NO: 50924 - DNA, 20 bp, synthetic construct
  misc_feature 1..20: note = chemically synthesized
  source 1..20: mol_type = other DNA
caattttgcaaccgttctat

SEQ ID NO: 50925 - DNA, 20 bp, synthetic construct
  misc_feature 1..20: note = chemically synthesized
  source 1..20: mol_type = other DNA
aataaagcagtttttcacaa

SEQ ID NO: 50926 - DNA, 20 bp, synthetic construct
  misc_feature 1..20: note = chemically synthesized
  source 1..20: mol_type = other DNA
aaaagaataaacacaaccag

SEQ ID NO: 50927 - DNA, 20 bp, synthetic construct
  misc_feature 1..20: note = chemically synthesized
  source 1..20: mol_type = other DNA
aaagaagtataaattagaaa

SEQ ID NO: 50928 - DNA, 20 bp, synthetic construct
  misc_feature 1..20: note = chemically synthesized
  source 1..20: mol_type = other DNA
cttaggctcagaaaatatta

SEQ ID NO: 50929 - DNA, 20 bp, synthetic construct
  misc_feature 1..20: note = chemically synthesized
  source 1..20: mol_type = other DNA
ctcagaaaatattaaggaat

SEQ ID NO: 50930 - DNA, 20 bp, synthetic construct
  misc_feature 1..20: note = chemically synthesized
  source 1..20: mol_type = other DNA
actttatgaacaaagatgtg

SEQ ID NO: 50931 - DNA, 20 bp, synthetic construct
  misc_feature 1..20: note = chemically synthesized
  source 1..20: mol_type = other DNA
agtttccttaactgtagagc

SEQ ID NO: 50932 - DNA, 20 bp, synthetic construct
  misc_feature 1..20: note = chemically synthesized
  source 1..20: mol_type = other DNA
ctgtttcataggactgttgt

SEQ ID NO: 50933 - DNA, 20 bp, synthetic construct
  misc_feature 1..20: note = chemically synthesized
  source 1..20: mol_type = other DNA
attataagcttgtgcctgga

SEQ ID NO: 50934 - DNA, 20 bp, synthetic construct
  misc_feature 1..20: note = chemically synthesized
  source 1..20: mol_type = other DNA
caataaaatgtacacagcgt

SEQ ID NO: 50935 - DNA, 20 bp, synthetic construct
  misc_feature 1..20: note = chemically synthesized
  source 1..20: mol_type = other DNA
tactattttaaccatttttg

SEQ ID NO: 50936 - DNA, 20 bp, synthetic construct
  misc_feature 1..20: note = chemically synthesized
  source 1..20: mol_type = other DNA
tgcaaccatcatcatatttc

SEQ ID NO: 50937 - DNA, 20 bp, synthetic construct
  misc_feature 1..20: note = chemically synthesized
  source 1..20: mol_type = other DNA
acaaaactcattatgtaatg

SEQ ID NO: 50938 - DNA, 20 bp, synthetic construct
  misc_feature 1..20: note = chemically synthesized
  source 1..20: mol_type = other DNA
gtaatgttgagtgaaaaaat

SEQ ID NO: 50939 - DNA, 20 bp, synthetic construct
  misc_feature 1..20: note = chemically synthesized
  source 1..20: mol_type = other DNA
tatatgacgtttacactctc

SEQ ID NO: 50940 - DNA, 20 bp, synthetic construct
  misc_feature 1..20: note = chemically synthesized
  source 1..20: mol_type = other DNA
tttacactctccagggttca

SEQ ID NO: 50941 - DNA, 20 bp, synthetic construct
  misc_feature 1..20: note = chemically synthesized
  source 1..20: mol_type = other DNA
tcaccactgctctgttcttc

SEQ ID NO: 50942 - DNA, 20 bp, synthetic construct
  misc_feature 1..20: note = chemically synthesized
  source 1..20: mol_type = other DNA
aagcccagctccctgtgatt

SEQ ID NO: 50943 - DNA, 20 bp, synthetic construct
  misc_feature 1..20: note = chemically synthesized
  source 1..20: mol_type = other DNA
gaatgaagtgtgcaatcgct

SEQ ID NO: 50944 - DNA, 20 bp, synthetic construct
  misc_feature 1..20: note = chemically synthesized
  source 1..20: mol_type = other DNA
tgtgcaatcgctatgagttt

SEQ ID NO: 50945 - DNA, 20 bp, synthetic construct
  misc_feature 1..20: note = chemically synthesized
  source 1..20: mol_type = other DNA
cgctatgagtttctgaatgg

SEQ ID NO: 50946 - DNA, 20 bp, synthetic construct
  misc_feature 1..20: note = chemically synthesized
  source 1..20: mol_type = other DNA
tcagtctcagtcccttagac

SEQ ID NO: 50947 - DNA, 20 bp, synthetic construct
  misc_feature 1..20: note = chemically synthesized
  source 1..20: mol_type = other DNA
tagacttgagtcccaaagta

SEQ ID NO: 50948 - DNA, 20 bp, synthetic construct
  misc_feature 1..20: note = chemically synthesized
  source 1..20: mol_type = other DNA
cccaaagtagcgaattcaag

SEQ ID NO: 50949 - DNA, 20 bp, synthetic construct
  misc_feature 1..20: note = chemically synthesized
  source 1..20: mol_type = other DNA
ccaaggggacttcttggggc

SEQ ID NO: 50950 - DNA, 20 bp, synthetic construct
  misc_feature 1..20: note = chemically synthesized
  source 1..20: mol_type = other DNA
cctcagaccactcaccctcc

SEQ ID NO: 50951 - DNA, 20 bp, synthetic construct
  misc_feature 1..20: note = chemically synthesized
  source 1..20: mol_type = other DNA
ttctggtagggaaggaggta

SEQ ID NO: 50952 - DNA, 20 bp, synthetic construct
  misc_feature 1..20: note = chemically synthesized
  source 1..20: mol_type = other DNA
gctcagatattgctgatgat

SEQ ID NO: 50953 - DNA, 20 bp, synthetic construct
  misc_feature 1..20: note = chemically synthesized
  source 1..20: mol_type = other DNA
aattgatttacaactggggc

SEQ ID NO: 50954 - DNA, 20 bp, synthetic construct
  misc_feature 1..20: note = chemically synthesized
  source 1..20: mol_type = other DNA
cgaaaatgtaagattgcacc

SEQ ID NO: 50955 - DNA, 20 bp, synthetic construct
  misc_feature 1..20: note = chemically synthesized
  source 1..20: mol_type = other DNA
ctcactgcaacttccacctc

SEQ ID NO: 50956 - DNA, 20 bp, synthetic construct
  misc_feature 1..20: note = chemically synthesized
  source 1..20: mol_type = other DNA
cttccacctcctgggttcaa

SEQ ID NO: 50957 - DNA, 20 bp, synthetic construct
  misc_feature 1..20: note = chemically synthesized
  source 1..20: mol_type = other DNA
actccagcctccctagtagc

SEQ ID NO: 50958 - DNA, 20 bp, synthetic construct
  misc_feature 1..20: note = chemically synthesized
  source 1..20: mol_type = other DNA
ttttgtatttttagtagaga

SEQ ID NO: 50959 - DNA, 20 bp, synthetic construct
  misc_feature 1..20: note = chemically synthesized
  source 1..20: mol_type = other DNA
gtcttggcctcccaaagtgc

SEQ ID NO: 50960 - DNA, 20 bp, synthetic construct
  misc_feature 1..20: note = chemically synthesized
  source 1..20: mol_type = other DNA
ctcccaaagtgctgggatta

SEQ ID NO: 50961 - DNA, 20 bp, synthetic construct
  misc_feature 1..20: note = chemically synthesized
  source 1..20: mol_type = other DNA
tttatttaagccacaactac

SEQ ID NO: 50962 - DNA, 20 bp, synthetic construct
  misc_feature 1..20: note = chemically synthesized
  source 1..20: mol_type = other DNA
gccacaactactagaatagg

SEQ ID NO: 50963 - DNA, 20 bp, synthetic construct
  misc_feature 1..20: note = chemically synthesized
  source 1..20: mol_type = other DNA
tcttgctctgtcacccaggc

SEQ ID NO: 50964 - DNA, 20 bp, synthetic construct
  misc_feature 1..20: note = chemically synthesized
  source 1..20: mol_type = other DNA
gcctcagcctacttagtagc

SEQ ID NO: 50965 - DNA, 20 bp, synthetic construct
  misc_feature 1..20: note = chemically synthesized
  source 1..20: mol_type = other DNA
ttttgtattttttgtagaga

SEQ ID NO: 50966 - DNA, 20 bp, synthetic construct
  misc_feature 1..20: note = chemically synthesized
  source 1..20: mol_type = other DNA
gccgtggcctcccaaaatgc

SEQ ID NO: 50967 - DNA, 20 bp, synthetic construct
  misc_feature 1..20: note = chemically synthesized
  source 1..20: mol_type = other DNA
gagccaccaccccctcctgg

SEQ ID NO: 50968 - DNA, 20 bp, synthetic construct
  misc_feature 1..20: note = chemically synthesized
  source 1..20: mol_type = other DNA
tttataattacagaaaacat

SEQ ID NO: 50969 - DNA, 20 bp, synthetic construct
  misc_feature 1..20: note = chemically synthesized
  source 1..20: mol_type = other DNA
agaaaacatgtgagttcact

SEQ ID NO: 50970 - DNA, 20 bp, synthetic construct
  misc_feature 1..20: note = chemically synthesized
  source 1..20: mol_type = other DNA
catttcggcacagtttggta

SEQ ID NO: 50971 - DNA, 20 bp, synthetic construct
  misc_feature 1..20: note = chemically synthesized
  source 1..20: mol_type = other DNA
gctcgtaaactaagacctga

SEQ ID NO: 50972 - DNA, 20 bp, synthetic construct
  misc_feature 1..20: note = chemically synthesized
  source 1..20: mol_type = other DNA
tgtgtctatcagctgcaccc

SEQ ID NO: 50973 - DNA, 20 bp, synthetic construct
  misc_feature 1..20: note = chemically synthesized
  source 1..20: mol_type = other DNA
tggaaagcttgagggaggct

SEQ ID NO: 50974 - DNA, 20 bp, synthetic construct
  misc_feature 1..20: note = chemically synthesized
  source 1..20: mol_type = other DNA
tggatgtgcagcacttggca

SEQ ID NO: 50975 - DNA, 20 bp, synthetic construct
  misc_feature 1..20: note = chemically synthesized
  source 1..20: mol_type = other DNA
tttattttatccaaaagaaa

SEQ ID NO: 50976 - DNA, 20 bp, synthetic construct
  misc_feature 1..20: note = chemically synthesized
  source 1..20: mol_type = other DNA
atcaggaaagatgaaggtct

SEQ ID NO: 50977 - DNA, 20 bp, synthetic construct
  misc_feature 1..20: note = chemically synthesized
  source 1..20: mol_type = other DNA
gaaggtctaggggtgaggga

SEQ ID NO: 50978 - DNA, 20 bp, synthetic construct
  misc_feature 1..20: note = chemically synthesized
  source 1..20: mol_type = other DNA
aaccctgctgagccagtggc

SEQ ID NO: 50979 - DNA, 20 bp, synthetic construct
  misc_feature 1..20: note = chemically synthesized
  source 1..20: mol_type = other DNA
ccagtggcatgggtctctga

SEQ ID NO: 50980 - DNA, 20 bp, synthetic construct
  misc_feature 1..20: note = chemically synthesized
  source 1..20: mol_type = other DNA
ttaatttgactatctggttt

SEQ ID NO: 50981 - DNA, 20 bp, synthetic construct
  misc_feature 1..20: note = chemically synthesized
  source 1..20: mol_type = other DNA
catgtaagtcaacaatgtcc

SEQ ID NO: 50982 - DNA, 20 bp, synthetic construct
  misc_feature 1..20: note = chemically synthesized
  source 1..20: mol_type = other DNA
acatagtttttttaaattat

SEQ ID NO: 50983 - DNA, 20 bp, synthetic construct
  misc_feature 1..20: note = chemically synthesized
  source 1..20: mol_type = other DNA
cgtgaagactgtcacggtgc

SEQ ID NO: 50984 - DNA, 20 bp, synthetic construct
  misc_feature 1..20: note = chemically synthesized
  source 1..20: mol_type = other DNA
aagactgtcacggtgctgga

SEQ ID NO: 50985 - DNA, 20 bp, synthetic construct
  misc_feature 1..20: note = chemically synthesized
  source 1..20: mol_type = other DNA
ggttgatttttctaatctaa

SEQ ID NO: 50986 - DNA, 20 bp, synthetic construct
  misc_feature 1..20: note = chemically synthesized
  source 1..20: mol_type = other DNA
ccattgtagctaactatgca

SEQ ID NO: 50987 - DNA, 20 bp, synthetic construct
  misc_feature 1..20: note = chemically synthesized
  source 1..20: mol_type = other DNA
tgaaacaatgaaataactct

SEQ ID NO: 50988 - DNA, 20 bp, synthetic construct
  misc_feature 1..20: note = chemically synthesized
  source 1..20: mol_type = other DNA
ttggttccttgacctgttca

SEQ ID NO: 50989 - DNA, 20 bp, synthetic construct
  misc_feature 1..20: note = chemically synthesized
  source 1..20: mol_type = other DNA
atttctctctttgttatggc

SEQ ID NO: 50990 - DNA, 20 bp, synthetic construct
  misc_feature 1..20: note = chemically synthesized
  source 1..20: mol_type = other DNA
ataatgattcaacaaatact

SEQ ID NO: 50991 - DNA, 20 bp, synthetic construct
  misc_feature 1..20: note = chemically synthesized
  source 1..20: mol_type = other DNA
acaaatactcagggtatttg

SEQ ID NO: 50992 - DNA, 20 bp, synthetic construct
  misc_feature 1..20: note = chemically synthesized
  source 1..20: mol_type = other DNA
atactcagggtatttgttga

SEQ ID NO: 50993 - DNA, 20 bp, synthetic construct
  misc_feature 1..20: note = chemically synthesized
  source 1..20: mol_type = other DNA
catacacaccgtgtgtgatt

SEQ ID NO: 50994 - DNA, 20 bp, synthetic construct
  misc_feature 1..20: note = chemically synthesized
  source 1..20: mol_type = other DNA
tatttagctcatggtatagg

SEQ ID NO: 50995 - DNA, 20 bp, synthetic construct
  misc_feature 1..20: note = chemically synthesized
  source 1..20: mol_type = other DNA
aatcaaggaaataaagaaac

SEQ ID NO: 50996 - DNA, 20 bp, synthetic construct
  misc_feature 1..20: note = chemically synthesized
  source 1..20: mol_type = other DNA
ggttaattgtttgccacttg

SEQ ID NO: 50997 - DNA, 20 bp, synthetic construct
  misc_feature 1..20: note = chemically synthesized
  source 1..20: mol_type = other DNA
aggcaacagaggaggcgagc

SEQ ID NO: 50998 - DNA, 20 bp, synthetic construct
  misc_feature 1..20: note = chemically synthesized
  source 1..20: mol_type = other DNA
gaggaggcgagcaaggattc

SEQ ID NO: 50999 - DNA, 20 bp, synthetic construct
  misc_feature 1..20: note = chemically synthesized
  source 1..20: mol_type = other DNA
cctgctggtgcctttgtgag

SEQ ID NO: 51000 - DNA, 20 bp, synthetic construct
  misc_feature 1..20: note = chemically synthesized
  source 1..20: mol_type = other DNA
tcccttgaggcaaatctctg

SEQ ID NO: 51001 - DNA, 20 bp, synthetic construct
  misc_feature 1..20: note = chemically synthesized
  source 1..20: mol_type = other DNA
gaggcaaatctctggagggt

SEQ ID NO: 51002 - DNA, 20 bp, synthetic construct
  misc_feature 1..20: note = chemically synthesized
  source 1..20: mol_type = other DNA
tataaatcacctgtgaactc

SEQ ID NO: 51003 - DNA, 20 bp, synthetic construct
  misc_feature 1..20: note = chemically synthesized
  source 1..20: mol_type = other DNA
agatgaacttgccctgcagg

SEQ ID NO: 51004 - DNA, 20 bp, synthetic construct
  misc_feature 1..20: note = chemically synthesized
  source 1..20: mol_type = other DNA
gactttaaagtcaaacacat

SEQ ID NO: 51005 - DNA, 20 bp, synthetic construct
  misc_feature 1..20: note = chemically synthesized
  source 1..20: mol_type = other DNA
gagcaggagaagattaagca

SEQ ID NO: 51006 - DNA, 20 bp, synthetic construct
  misc_feature 1..20: note = chemically synthesized
  source 1..20: mol_type = other DNA
tgtctatgtctgtgtgtgta

SEQ ID NO: 51007 - DNA, 20 bp, synthetic construct
  misc_feature 1..20: note = chemically synthesized
  source 1..20: mol_type = other DNA
ctgtgtgtgtagggagtgca

SEQ ID NO: 51008 - DNA, 20 bp, synthetic construct
  misc_feature 1..20: note = chemically synthesized
  source 1..20: mol_type = other DNA
gtgtagggagtgcaggggat

SEQ ID NO: 51009 - DNA, 20 bp, synthetic construct
  misc_feature 1..20: note = chemically synthesized
  source 1..20: mol_type = other DNA
ctatttcagcccatggaaac

SEQ ID NO: 51010 - DNA, 20 bp, synthetic construct
  misc_feature 1..20: note = chemically synthesized
  source 1..20: mol_type = other DNA
tagaacaaacttctctgcca

SEQ ID NO: 51011 - DNA, 20 bp, synthetic construct
  misc_feature 1..20: note = chemically synthesized
  source 1..20: mol_type = other DNA
gttatctttccaatgtgtgc

SEQ ID NO: 51012 - DNA, 20 bp, synthetic construct
  misc_feature 1..20: note = chemically synthesized
  source 1..20: mol_type = other DNA
ttgccatatgagccctggag

SEQ ID NO: 51013 - DNA, 20 bp, synthetic construct
  misc_feature 1..20: note = chemically synthesized
  source 1..20: mol_type = other DNA
gaggtgaatcagagaaacaa

SEQ ID NO: 51014 - DNA, 20 bp, synthetic construct
  misc_feature 1..20: note = chemically synthesized
  source 1..20: mol_type = other DNA
aagaaaaattgattctgttt

SEQ ID NO: 51015 - DNA, 20 bp, synthetic construct
  misc_feature 1..20: note = chemically synthesized
  source 1..20: mol_type = other DNA
ctagcaacatgagctgggga

SEQ ID NO: 51016 - DNA, 20 bp, synthetic construct
  misc_feature 1..20: note = chemically synthesized
  source 1..20: mol_type = other DNA
taaatggaagtttcctcttt

SEQ ID NO: 51017 - DNA, 20 bp, synthetic construct
  misc_feature 1..20: note = chemically synthesized
  source 1..20: mol_type = other DNA
tgaagtcacactgtgagcta

SEQ ID NO: 51018 - DNA, 20 bp, synthetic construct
  misc_feature 1..20: note = chemically synthesized
  source 1..20: mol_type = other DNA
gcacaactcttcctggaaaa

SEQ ID NO: 51019 - DNA, 20 bp, synthetic construct
  misc_feature 1..20: note = chemically synthesized
  source 1..20: mol_type = other DNA
agttcaaatgagaaacagtg

SEQ ID NO: 51020 - DNA, 20 bp, synthetic construct
  misc_feature 1..20: note = chemically synthesized
  source 1..20: mol_type = other DNA
aaacagtgcggggtgaagac

SEQ ID NO: 51021 - DNA, 20 bp, synthetic construct
  misc_feature 1..20: note = chemically synthesized
  source 1..20: mol_type = other DNA
tatctatcaagtgcttttta

SEQ ID NO: 51022 - DNA, 20 bp, synthetic construct
  misc_feature 1..20: note = chemically synthesized
  source 1..20: mol_type = other DNA
gctttttagtggattaggtt

SEQ ID NO: 51023 - DNA, 20 bp, synthetic construct
  misc_feature 1..20: note = chemically synthesized
  source 1..20: mol_type = other DNA
aggtcaggacaggcctttct

SEQ ID NO: 51024 - DNA, 20 bp, synthetic construct
  misc_feature 1..20: note = chemically synthesized
  source 1..20: mol_type = other DNA
ggacaggcctttctgagaat

SEQ ID NO: 51025 - DNA, 20 bp, synthetic construct
  misc_feature 1..20: note = chemically synthesized
  source 1..20: mol_type = other DNA
tctgttcatctgcctttcta

SEQ ID NO: 51026 - DNA, 20 bp, synthetic construct
  misc_feature 1..20: note = chemically synthesized
  source 1..20: mol_type = other DNA
tcctaaggagcctcaggaca

SEQ ID NO: 51027 - DNA, 20 bp, synthetic construct
  misc_feature 1..20: note = chemically synthesized
  source 1..20: mol_type = other DNA
tttacaatttcctctgaaat

SEQ ID NO: 51028 - DNA, 20 bp, synthetic construct
  misc_feature 1..20: note = chemically synthesized
  source 1..20: mol_type = other DNA
ctatcaacaccttggaaaaa

SEQ ID NO: 51029 - DNA, 20 bp, synthetic construct
  misc_feature 1..20: note = chemically synthesized
  source 1..20: mol_type = other DNA
tccaaggttcatttctacac

SEQ ID NO: 51030 - DNA, 20 bp, synthetic construct
  misc_feature 1..20: note = chemically synthesized
  source 1..20: mol_type = other DNA
caggaggtggaagcccctga

SEQ ID NO: 51031 - DNA, 20 bp, synthetic construct
  misc_feature 1..20: note = chemically synthesized
  source 1..20: mol_type = other DNA
cctgagagaatggaggtctg

SEQ ID NO: 51032 - DNA, 20 bp, synthetic construct
  misc_feature 1..20: note = chemically synthesized
  source 1..20: mol_type = other DNA
ccaagtcctgcatgctagac

SEQ ID NO: 51033 - DNA, 20 bp, synthetic construct
  misc_feature 1..20: note = chemically synthesized
  source 1..20: mol_type = other DNA
ctagacatgagtggaggagg

SEQ ID NO: 51034 - DNA, 20 bp, synthetic construct
  misc_feature 1..20: note = chemically synthesized
  source 1..20: mol_type = other DNA
gggggaatacctaggtagaa

SEQ ID NO: 51035 - DNA, 20 bp, synthetic construct
  misc_feature 1..20: note = chemically synthesized
  source 1..20: mol_type = other DNA
tcactgtgcagttaactttt

SEQ ID NO: 51036 - DNA, 20 bp, synthetic construct
  misc_feature 1..20: note = chemically synthesized
  source 1..20: mol_type = other DNA
cggttgcagttagtatacat

SEQ ID NO: 51037 - DNA, 20 bp, synthetic construct
  misc_feature 1..20: note = chemically synthesized
  source 1..20: mol_type = other DNA
tgagtgctatacaaccttct

SEQ ID NO: 51038 - DNA, 20 bp, synthetic construct
  misc_feature 1..20: note = chemically synthesized
  source 1..20: mol_type = other DNA
gaagcaatgcagccattacg

SEQ ID NO: 51039 - DNA, 20 bp, synthetic construct
  misc_feature 1..20: note = chemically synthesized
  source 1..20: mol_type = other DNA
taaaaagtatttctttaggt

SEQ ID NO: 51040 - DNA, 20 bp, synthetic construct
  misc_feature 1..20: note = chemically synthesized
  source 1..20: mol_type = other DNA
ctacgcattgacttatcttc

SEQ ID NO: 51041 - DNA, 20 bp, synthetic construct
  misc_feature 1..20: note = chemically synthesized
  source 1..20: mol_type = other DNA
cctccagcacacagcaggga

SEQ ID NO: 51042 - DNA, 20 bp, synthetic construct
  misc_feature 1..20: note = chemically synthesized
  source 1..20: mol_type = other DNA
ggctgcactctgtgtttttg

SEQ ID NO: 51043 - DNA, 20 bp, synthetic construct
  misc_feature 1..20: note = chemically synthesized
  source 1..20: mol_type = other DNA
ctagggaaggaaaaaagatc

SEQ ID NO: 51044 - DNA, 20 bp, synthetic construct
  misc_feature 1..20: note = chemically synthesized
  source 1..20: mol_type = other DNA
ctgcccccaagctgtagagc

SEQ ID NO: 51045 - DNA, 20 bp, synthetic construct
  misc_feature 1..20: note = chemically synthesized
  source 1..20: mol_type = other DNA
gcctacatctttctcctgtg

SEQ ID NO: 51046 - DNA, 20 bp, synthetic construct
  misc_feature 1..20: note = chemically synthesized
  source 1..20: mol_type = other DNA
ttatgggaccttgtaatctt

SEQ ID NO: 51047 - DNA, 20 bp, synthetic construct
  misc_feature 1..20: note = chemically synthesized
  source 1..20: mol_type = other DNA
cttaataagctcccctttgt

SEQ ID NO: 51048 - DNA, 20 bp, synthetic construct
  misc_feature 1..20: note = chemically synthesized
  source 1..20: mol_type = other DNA
cagaagtggttcttgaggaa

SEQ ID NO: 51049 - DNA, 20 bp, synthetic construct
  misc_feature 1..20: note = chemically synthesized
  source 1..20: mol_type = other DNA
ttcttgaggaacagaatatt

SEQ ID NO: 51050 - DNA, 20 bp, synthetic construct
  misc_feature 1..20: note = chemically synthesized
  source 1..20: mol_type = other DNA
gaggaacagaatattaagga

SEQ ID NO: 51051 - DNA, 20 bp, synthetic construct
  misc_feature 1..20: note = chemically synthesized
  source 1..20: mol_type = other DNA
gaacactgatagtacttggc

SEQ ID NO: 51052 - DNA, 20 bp, synthetic construct
  misc_feature 1..20: note = chemically synthesized
  source 1..20: mol_type = other DNA
tacttggcctgaattgttta

SEQ ID NO: 51053 - DNA, 20 bp, synthetic construct
  misc_feature 1..20: note = chemically synthesized
  source 1..20: mol_type = other DNA
ttcatcacttatgagaggca

SEQ ID NO: 51054 - DNA, 20 bp, synthetic construct
  misc_feature 1..20: note = chemically synthesized
  source 1..20: mol_type = other DNA
gaaagaaaatgatgatctca

SEQ ID NO: 51055 - DNA, 20 bp, synthetic construct
  misc_feature 1..20: note = chemically synthesized
  source 1..20: mol_type = other DNA
acaaatctgctaagattgcc

SEQ ID NO: 51056 - DNA, 20 bp, synthetic construct
  misc_feature 1..20: note = chemically synthesized
  source 1..20: mol_type = other DNA
ctgctaagattgccctgaat

SEQ ID NO: 51057 - DNA, 20 bp, synthetic construct
  misc_feature 1..20: note = chemically synthesized
  source 1..20: mol_type = other DNA
agttttaactcctgtagaga

SEQ ID NO: 51058 - DNA, 20 bp, synthetic construct
  misc_feature 1..20: note = chemically synthesized
  source 1..20: mol_type = other DNA
cagagacaagctgttatcat

SEQ ID NO: 51059 - DNA, 20 bp, synthetic construct
  misc_feature 1..20: note = chemically synthesized
  source 1..20: mol_type = other DNA
aaaaatgggaccctggaact

SEQ ID NO: 51060 - DNA, 20 bp, synthetic construct
  misc_feature 1..20: note = chemically synthesized
  source 1..20: mol_type = other DNA
gggaccctggaacttggagt

SEQ ID NO: 51061 - DNA, 20 bp, synthetic construct
  misc_feature 1..20: note = chemically synthesized
  source 1..20: mol_type = other DNA
ccctgatgaagctgaggaca

SEQ ID NO: 51062 - DNA, 20 bp, synthetic construct
  misc_feature 1..20: note = chemically synthesized
  source 1..20: mol_type = other DNA
tagcctttccacctttgtct

SEQ ID NO: 51063 - DNA, 20 bp, synthetic construct
  misc_feature 1..20: note = chemically synthesized
  source 1..20: mol_type = other DNA
aagaggcacccctaatgccc

SEQ ID NO: 51064 - DNA, 20 bp, synthetic construct
  misc_feature 1..20: note = chemically synthesized
  source 1..20: mol_type = other DNA
cgggccccagaggtgaggtt

SEQ ID NO: 51065 - DNA, 20 bp, synthetic construct
  misc_feature 1..20: note = chemically synthesized
  source 1..20: mol_type = other DNA
gaaatctggagaacaggcat

SEQ ID NO: 51066 - DNA, 20 bp, synthetic construct
  misc_feature 1..20: note = chemically synthesized
  source 1..20: mol_type = other DNA
tctggagaacaggcatggga

SEQ ID NO: 51067 - DNA, 20 bp, synthetic construct
  misc_feature 1..20: note = chemically synthesized
  source 1..20: mol_type = other DNA
caggcatgggaatggatatt

SEQ ID NO: 51068 - DNA, 20 bp, synthetic construct
  misc_feature 1..20: note = chemically synthesized
  source 1..20: mol_type = other DNA
gggaatggatattaagggta

SEQ ID NO: 51069 - DNA, 20 bp, synthetic construct
  misc_feature 1..20: note = chemically synthesized
  source 1..20: mol_type = other DNA
ggataatggtggaagggaca

SEQ ID NO: 51070 - DNA, 20 bp, synthetic construct
  misc_feature 1..20: note = chemically synthesized
  source 1..20: mol_type = other DNA
atggtggaagggacatagag

SEQ ID NO: 51071 - DNA, 20 bp, synthetic construct
  misc_feature 1..20: note = chemically synthesized
  source 1..20: mol_type = other DNA
ggacatagagttggatcaag

SEQ ID NO: 51072 - DNA, 20 bp, synthetic construct
  misc_feature 1..20: note = chemically synthesized
  source 1..20: mol_type = other DNA
ttggtttggccctactaagt

SEQ ID NO: 51073 - DNA, 20 bp, synthetic construct
  misc_feature 1..20: note = chemically synthesized
  source 1..20: mol_type = other DNA
tttgcttggttagctgaaat

SEQ ID NO: 51074 - DNA, 20 bp, synthetic construct
  misc_feature 1..20: note = chemically synthesized
  source 1..20: mol_type = other DNA
atccaaaggcttagggagat

SEQ ID NO: 51075 - DNA, 20 bp, synthetic construct
  misc_feature 1..20: note = chemically synthesized
  source 1..20: mol_type = other DNA
gcttagggagattaggatgg

SEQ ID NO: 51076 - DNA, 20 bp, synthetic construct
  misc_feature 1..20: note = chemically synthesized
  source 1..20: mol_type = other DNA
agggagattaggatggtgga

SEQ ID NO: 51077 - DNA, 20 bp, synthetic construct
  misc_feature 1..20: note = chemically synthesized
  source 1..20: mol_type = other DNA
gacctactcatcccagctgg

SEQ ID NO: 51078 - DNA, 20 bp, synthetic construct
  misc_feature 1..20: note = chemically synthesized
  source 1..20: mol_type = other DNA
ctacaaaatttaaatacaat

SEQ ID NO: 51079 - DNA, 20 bp, synthetic construct
  misc_feature 1..20: note = chemically synthesized
  source 1..20: mol_type = other DNA
tttaaatacaatgggaataa

SEQ ID NO: 51080 - DNA, 20 bp, synthetic construct
  misc_feature 1..20: note = chemically synthesized
  source 1..20: mol_type = other DNA
agcagaggcaaagcagccat

SEQ ID NO: 51081 - DNA, 20 bp, synthetic construct
  misc_feature 1..20: note = chemically synthesized
  source 1..20: mol_type = other DNA
ataaacaaaaaactgccagg

SEQ ID NO: 51082 - DNA, 20 bp, synthetic construct
  misc_feature 1..20: note = chemically synthesized
  source 1..20: mol_type = other DNA
agaatggactaaagactaat

SEQ ID NO: 51083 - DNA, 20 bp, synthetic construct
  misc_feature 1..20: note = chemically synthesized
  source 1..20: mol_type = other DNA
taatctgaattataaaaaca

SEQ ID NO: 51084 - DNA, 20 bp, synthetic construct
  misc_feature 1..20: note = chemically synthesized
  source 1..20: mol_type = other DNA
tgttacagttccagaaccca

SEQ ID NO: 51085 - DNA, 20 bp, synthetic construct
  misc_feature 1..20: note = chemically synthesized
  source 1..20: mol_type = other DNA
cccactgaatgaaggggagg

SEQ ID NO: 51086 - DNA, 20 bp, synthetic construct
  misc_feature 1..20: note = chemically synthesized
  source 1..20: mol_type = other DNA
ggagacctctggccttttac

SEQ ID NO: 51087 - DNA, 20 bp, synthetic construct
  misc_feature 1..20: note = chemically synthesized
  source 1..20: mol_type = other DNA
ctctgagctgacgttgattc

SEQ ID NO: 51088 - DNA, 20 bp, synthetic construct
  misc_feature 1..20: note = chemically synthesized
  source 1..20: mol_type = other DNA
tatggaggttaggtaattaa

SEQ ID NO: 51089 - DNA, 20 bp, synthetic construct
  misc_feature 1..20: note = chemically synthesized
  source 1..20: mol_type = other DNA
tctgacttacagtggttcca

SEQ ID NO: 51090 - DNA, 20 bp, synthetic construct
  misc_feature 1..20: note = chemically synthesized
  source 1..20: mol_type = other DNA
cacattggctccctgactgg

SEQ ID NO: 51091 - DNA, 20 bp, synthetic construct
  misc_feature 1..20: note = chemically synthesized
  source 1..20: mol_type = other DNA
atcaaggacttgaaagacgc

SEQ ID NO: 51092 - DNA, 20 bp, synthetic construct
  misc_feature 1..20: note = chemically synthesized
  source 1..20: mol_type = other DNA
ttgacctgtgcagaggacag

SEQ ID NO: 51093 - DNA, 20 bp, synthetic construct
  misc_feature 1..20: note = chemically synthesized
  source 1..20: mol_type = other DNA
atggatcttggaaaatgatg

SEQ ID NO: 51094 - DNA, 20 bp, synthetic construct
  misc_feature 1..20: note = chemically synthesized
  source 1..20: mol_type = other DNA
tacctttaccaccctacctc

SEQ ID NO: 51095 - DNA, 20 bp, synthetic construct
  misc_feature 1..20: note = chemically synthesized
  source 1..20: mol_type = other DNA
cattcatgacattatgatga

SEQ ID NO: 51096 - DNA, 20 bp, synthetic construct
  misc_feature 1..20: note = chemically synthesized
  source 1..20: mol_type = other DNA
ggtgagacatttgtatgcca

SEQ ID NO: 51097 - DNA, 20 bp, synthetic construct
  misc_feature 1..20: note = chemically synthesized
  source 1..20: mol_type = other DNA
ttctacctcggtaaaatttc

SEQ ID NO: 51098 - DNA, 20 bp, synthetic construct
  misc_feature 1..20: note = chemically synthesized
  source 1..20: mol_type = other DNA
acaatgcctggtgggcctat

SEQ ID NO: 51099 - DNA, 20 bp, synthetic construct
  misc_feature 1..20: note = chemically synthesized
  source 1..20: mol_type = other DNA
ggaggcaacacattcctcgt

SEQ ID NO: 51100 - DNA, 20 bp, synthetic construct
  misc_feature 1..20: note = chemically synthesized
  source 1..20: mol_type = other DNA
gtgttactctggcccattta

SEQ ID NO: 51101 - DNA, 20 bp, synthetic construct
  misc_feature 1..20: note = chemically synthesized
  source 1..20: mol_type = other DNA
ttgaggtgtcagtggcagat

SEQ ID NO: 51102 - DNA, 20 bp, synthetic construct
  misc_feature 1..20: note = chemically synthesized
  source 1..20: mol_type = other DNA
cctttggcaggcccccatag

SEQ ID NO: 51103 - DNA, 20 bp, synthetic construct
  misc_feature 1..20: note = chemically synthesized
  source 1..20: mol_type = other DNA
tgaatcacagtggagacctc

SEQ ID NO: 51104 - DNA, 20 bp, synthetic construct
  misc_feature 1..20: note = chemically synthesized
  source 1..20: mol_type = other DNA
tggtaactgaacgtttgact

SEQ ID NO: 51105 - DNA, 20 bp, synthetic construct
  misc_feature 1..20: note = chemically synthesized
  source 1..20: mol_type = other DNA
ctgacccatctagccatgaa

SEQ ID NO: 51106 - DNA, 20 bp, synthetic construct
  misc_feature 1..20: note = chemically synthesized
  source 1..20: mol_type = other DNA
cctgcaccaatggcctcatg

SEQ ID NO: 51107 - DNA, 20 bp, synthetic construct
  misc_feature 1..20: note = chemically synthesized
  source 1..20: mol_type = other DNA
tatgtaataacttttggttt

SEQ ID NO: 51108 - DNA, 20 bp, synthetic construct
  misc_feature 1..20: note = chemically synthesized
  source 1..20: mol_type = other DNA
tggtgcgtttctggttgtat

SEQ ID NO: 51109 - DNA, 20 bp, synthetic construct
  misc_feature 1..20: note = chemically synthesized
  source 1..20: mol_type = other DNA
ttgaagattatgtatgattt

SEQ ID NO: 51110 - DNA, 20 bp, synthetic construct
  misc_feature 1..20: note = chemically synthesized
  source 1..20: mol_type = other DNA
tatgatttcaggatgtgtgt

SEQ ID NO: 51111 - DNA, 20 bp, synthetic construct
  misc_feature 1..20: note = chemically synthesized
  source 1..20: mol_type = other DNA
tgtatgggttcaagttgaca

SEQ ID NO: 51112 - DNA, 20 bp, synthetic construct
  misc_feature 1..20: note = chemically synthesized
  source 1..20: mol_type = other DNA
ggttaatactgtcaacttga

SEQ ID NO: 51113 - DNA, 20 bp, synthetic construct
  misc_feature 1..20: note = chemically synthesized
  source 1..20: mol_type = other DNA
ttaatctcggttatgtctgt

SEQ ID NO: 51114 - DNA, 20 bp, synthetic construct
  misc_feature 1..20: note = chemically synthesized
  source 1..20: mol_type = other DNA
tggcaaaaggagattaacat

SEQ ID NO: 51115 - DNA, 20 bp, synthetic construct
  misc_feature 1..20: note = chemically synthesized
  source 1..20: mol_type = other DNA
atacaactatcctcatacaa

SEQ ID NO: 51116 - DNA, 20 bp, synthetic construct
  misc_feature 1..20: note = chemically synthesized
  source 1..20: mol_type = other DNA
gcacaagtgtacacatgcat

SEQ ID NO: 51117 - DNA, 20 bp, synthetic construct
  misc_feature 1..20: note = chemically synthesized
  source 1..20: mol_type = other DNA
ccacttcatggctagatggg

SEQ ID NO: 51118 - DNA, 20 bp, synthetic construct
  misc_feature 1..20: note = chemically synthesized
  source 1..20: mol_type = other DNA
ggtctcatgccactggaacc

SEQ ID NO: 51119 - DNA, 20 bp, synthetic construct
  misc_feature 1..20: note = chemically synthesized
  source 1..20: mol_type = other DNA
accctagaaattttaccgag

SEQ ID NO: 51120 - DNA, 20 bp, synthetic construct
  misc_feature 1..20: note = chemically synthesized
  source 1..20: mol_type = other DNA
tgggtcttatggacaggaat

SEQ ID NO: 51121 - DNA, 20 bp, synthetic construct
  misc_feature 1..20: note = chemically synthesized
  source 1..20: mol_type = other DNA
cccactggaaccactgtaag

SEQ ID NO: 51122 - DNA, 20 bp, synthetic construct
  misc_feature 1..20: note = chemically synthesized
  source 1..20: mol_type = other DNA
ggtctccttagggaaggatg

SEQ ID NO: 51123 - DNA, 20 bp, synthetic construct
  misc_feature 1..20: note = chemically synthesized
  source 1..20: mol_type = other DNA
atggggtttcaccattttag

SEQ ID NO: 51124 - DNA, 20 bp, synthetic construct
  misc_feature 1..20: note = chemically synthesized
  source 1..20: mol_type = other DNA
cccgagctgcaacattaaat

SEQ ID NO: 51125 - DNA, 20 bp, synthetic construct
  misc_feature 1..20: note = chemically synthesized
  source 1..20: mol_type = other DNA
cagatttctgccaatataaa

SEQ ID NO: 51126 - DNA, 20 bp, synthetic construct
  misc_feature 1..20: note = chemically synthesized
  source 1..20: mol_type = other DNA
gcattaggggtgcctcttga

SEQ ID NO: 51127 - DNA, 20 bp, synthetic construct
  misc_feature 1..20: note = chemically synthesized
  source 1..20: mol_type = other DNA
cagaagtcccaaaaccaatg

SEQ ID NO: 51128 - DNA, 20 bp, synthetic construct
  misc_feature 1..20: note = chemically synthesized
  source 1..20: mol_type = other DNA
agcaggaaggatccagcaca

SEQ ID NO: 51129 - DNA, 20 bp, synthetic construct
  misc_feature 1..20: note = chemically synthesized
  source 1..20: mol_type = other DNA
gagtagcaggtgaaagctca

SEQ ID NO: 51130 - DNA, 20 bp, synthetic construct
  misc_feature 1..20: note = chemically synthesized
  source 1..20: mol_type = other DNA
caggtgaaagctcacaagaa

SEQ ID NO: 51131 - DNA, 20 bp, synthetic construct
  misc_feature 1..20: note = chemically synthesized
  source 1..20: mol_type = other DNA
tagtaggggcagggaccagt

SEQ ID NO: 51132 - DNA, 20 bp, synthetic construct
  misc_feature 1..20: note = chemically synthesized
  source 1..20: mol_type = other DNA
ttgagataaacagtggtaag

SEQ ID NO: 51133 - DNA, 20 bp, synthetic construct
  misc_feature 1..20: note = chemically synthesized
  source 1..20: mol_type = other DNA
cgtagaagtaattccaacct

SEQ ID NO: 51134 - DNA, 20 bp, synthetic construct
  misc_feature 1..20: note = chemically synthesized
  source 1..20: mol_type = other DNA
acaatattgcaaatcattat

SEQ ID NO: 51135 - DNA, 20 bp, synthetic construct
  misc_feature 1..20: note = chemically synthesized
  source 1..20: mol_type = other DNA
tctaaccataaaatcttaaa

SEQ ID NO: 51136 - DNA, 20 bp, synthetic construct
  misc_feature 1..20: note = chemically synthesized
  source 1..20: mol_type = other DNA
gttgatctgctaatccctgt

SEQ ID NO: 51137 - DNA, 20 bp, synthetic construct
  misc_feature 1..20: note = chemically synthesized
  source 1..20: mol_type = other DNA
gacacaccactattagttgg

SEQ ID NO: 51138 - DNA, 20 bp, synthetic construct
  misc_feature 1..20: note = chemically synthesized
  source 1..20: mol_type = other DNA
atgccgatgacaagtatcca

SEQ ID NO: 51139 - DNA, 20 bp, synthetic construct
  misc_feature 1..20: note = chemically synthesized
  source 1..20: mol_type = other DNA
agatgaacagattctcattc

SEQ ID NO: 51140 - DNA, 20 bp, synthetic construct
  misc_feature 1..20: note = chemically synthesized
  source 1..20: mol_type = other DNA
tagatatatcaaaatatcat

SEQ ID NO: 51141 - DNA, 20 bp, synthetic construct
  misc_feature 1..20: note = chemically synthesized
  source 1..20: mol_type = other DNA
ttgctaggaaatatcccaaa

SEQ ID NO: 51142 - DNA, 20 bp, synthetic construct
  misc_feature 1..20: note = chemically synthesized
  source 1..20: mol_type = other DNA
aatagggtttatttgttggt

SEQ ID NO: 51143 - DNA, 20 bp, synthetic construct
  misc_feature 1..20: note = chemically synthesized
  source 1..20: mol_type = other DNA
aatgtattttattaatggtg

SEQ ID NO: 51144 - DNA, 20 bp, synthetic construct
  misc_feature 1..20: note = chemically synthesized
  source 1..20: mol_type = other DNA
tctcactgagcatggctgta

SEQ ID NO: 51145 - DNA, 20 bp, synthetic construct
  misc_feature 1..20: note = chemically synthesized
  source 1..20: mol_type = other DNA
attggaaagataacacgtcc

SEQ ID NO: 51146 - DNA, 20 bp, synthetic construct
  misc_feature 1..20: note = chemically synthesized
  source 1..20: mol_type = other DNA
gctttccaaaagagcttatc

SEQ ID NO: 51147 - DNA, 20 bp, synthetic construct
  misc_feature 1..20: note = chemically synthesized
  source 1..20: mol_type = other DNA
cctagtttccatgggctgaa

SEQ ID NO: 51148 - DNA, 20 bp, synthetic construct
  misc_feature 1..20: note = chemically synthesized
  source 1..20: mol_type = other DNA
ttactcaggccataacaaag

SEQ ID NO: 51149 - DNA, 20 bp, synthetic construct
  misc_feature 1..20: note = chemically synthesized
  source 1..20: mol_type = other DNA
tgtaggcacactcttttaga

SEQ ID NO: 51150 - DNA, 20 bp, synthetic construct
  misc_feature 1..20: note = chemically synthesized
  source 1..20: mol_type = other DNA
ggaaattaaacttatttttt

SEQ ID NO: 51151 - DNA, 20 bp, synthetic construct
  misc_feature 1..20: note = chemically synthesized
  source 1..20: mol_type = other DNA
tgtatttttactacattgtg

SEQ ID NO: 51152 - DNA, 20 bp, synthetic construct
  misc_feature 1..20: note = chemically synthesized
  source 1..20: mol_type = other DNA
aaactatgtcttacctgatt

SEQ ID NO: 51153 - DNA, 20 bp, synthetic construct
  misc_feature 1..20: note = chemically synthesized
  source 1..20: mol_type = other DNA
ttgggactggccagcagtgc

SEQ ID NO: 51154 - DNA, 20 bp, synthetic construct
  misc_feature 1..20: note = chemically synthesized
  source 1..20: mol_type = other DNA
ctactaagtaggctgaggca

SEQ ID NO: 51155 - DNA, 20 bp, synthetic construct
  misc_feature 1..20: note = chemically synthesized
  source 1..20: mol_type = other DNA
agatggaggttgcagtgagc

SEQ ID NO: 51156 - DNA, 20 bp, synthetic construct
  misc_feature 1..20: note = chemically synthesized
  source 1..20: mol_type = other DNA
ctccagcctgggtgacagag

SEQ ID NO: 51157 - DNA, 20 bp, synthetic construct
  misc_feature 1..20: note = chemically synthesized
  source 1..20: mol_type = other DNA
cagagcaagaatgtctcagg

SEQ ID NO: 51158 - DNA, 20 bp, synthetic construct
  misc_feature 1..20: note = chemically synthesized
  source 1..20: mol_type = other DNA
catgaagtaaagcaagagtg

SEQ ID NO: 51159 - DNA, 20 bp, synthetic construct
  misc_feature 1..20: note = chemically synthesized
  source 1..20: mol_type = other DNA
accctctacctccttcccta

SEQ ID NO: 51160 - DNA, 20 bp, synthetic construct
  misc_feature 1..20: note = chemically synthesized
  source 1..20: mol_type = other DNA
agtggatttgactcttccat

SEQ ID NO: 51161 - DNA, 20 bp, synthetic construct
  misc_feature 1..20: note = chemically synthesized
  source 1..20: mol_type = other DNA
cacagggagctgggcttcct

SEQ ID NO: 51162 - DNA, 20 bp, synthetic construct
  misc_feature 1..20: note = chemically synthesized
  source 1..20: mol_type = other DNA
tacctgtgtttaaaaagatg

SEQ ID NO: 51163 - DNA, 20 bp, synthetic construct
  misc_feature 1..20: note = chemically synthesized
  source 1..20: mol_type = other DNA
ttctttgcttttaaaaccat

SEQ ID NO: 51164 - DNA, 20 bp, synthetic construct
  misc_feature 1..20: note = chemically synthesized
  source 1..20: mol_type = other DNA
taatgtttaaatgtagagtc

SEQ ID NO: 51165 - DNA, 20 bp, synthetic construct
  misc_feature 1..20: note = chemically synthesized
  source 1..20: mol_type = other DNA
gtacattttattgcaataaa

SEQ ID NO: 51166 - DNA, 20 bp, synthetic construct
  misc_feature 1..20: note = chemically synthesized
  source 1..20: mol_type = other DNA
tatgacagtgtaaaatgtca

SEQ ID NO: 51167 - DNA, 20 bp, synthetic construct
  misc_feature 1..20: note = chemically synthesized
  source 1..20: mol_type = other DNA
ttttgcaagcccagctttca

SEQ ID NO: 51168 - DNA, 20 bp, synthetic construct
  misc_feature 1..20: note = chemically synthesized
  source 1..20: mol_type = other DNA
cttagatcattgactttggt

SEQ ID NO: 51169 - DNA, 20 bp, synthetic construct
  misc_feature 1..20: note = chemically synthesized
  source 1..20: mol_type = other DNA
gtgtgagggagcaccgttct

SEQ ID NO: 51170 - DNA, 20 bp, synthetic construct
  misc_feature 1..20: note = chemically synthesized
  source 1..20: mol_type = other DNA
cctgatgtcattattgacat

SEQ ID NO: 51171 - DNA, 20 bp, synthetic construct
  misc_feature 1..20: note = chemically synthesized
  source 1..20: mol_type = other DNA
tcatggtctagttagtgttc

SEQ ID NO: 51172 - DNA, 20 bp, synthetic construct
  misc_feature 1..20: note = chemically synthesized
  source 1..20: mol_type = other DNA
agcctagtgggggatggtgg

SEQ ID NO: 51173 - DNA, 20 bp, synthetic construct
  misc_feature 1..20: note = chemically synthesized
  source 1..20: mol_type = other DNA
gtgtggatggttgtggggca

SEQ ID NO: 51174 - DNA, 20 bp, synthetic construct
  misc_feature 1..20: note = chemically synthesized
  source 1..20: mol_type = other DNA
tgatgataatggtgatggtg

SEQ ID NO: 51175 - DNA, 20 bp, synthetic construct
  misc_feature 1..20: note = chemically synthesized
  source 1..20: mol_type = other DNA
ggtctcacctgcaggtccac

SEQ ID NO: 51176 - DNA, 20 bp, synthetic construct
  misc_feature 1..20: note = chemically synthesized
  source 1..20: mol_type = other DNA
ctctgcccgatgcttggtag

SEQ ID NO: 51177 - DNA, 20 bp, synthetic construct
  misc_feature 1..20: note = chemically synthesized
  source 1..20: mol_type = other DNA
tgcagtcaaaggctctgggg

SEQ ID NO: 51178 - DNA, 20 bp, synthetic construct
  misc_feature 1..20: note = chemically synthesized
  source 1..20: mol_type = other DNA
tgaaagctgggcttgcaaaa

SEQ ID NO: 51179 - DNA, 20 bp, synthetic construct
  misc_feature 1..20: note = chemically synthesized
  source 1..20: mol_type = other DNA
ccgttctatttgaatttggc

SEQ ID NO: 51180 - DNA, 20 bp, synthetic construct
  misc_feature 1..20: note = chemically synthesized
  source 1..20: mol_type = other DNA
aaataaagcagtttttcaca

SEQ ID NO: 51181 - DNA, 20 bp, synthetic construct
  misc_feature 1..20: note = chemically synthesized
  source 1..20: mol_type = other DNA
caaaagaataaacacaacca

SEQ ID NO: 51182 - DNA, 20 bp, synthetic construct
  misc_feature 1..20: note = chemically synthesized
  source 1..20: mol_type = other DNA
aattgtcaaagaagtataaa

SEQ ID NO: 51183 - DNA, 20 bp, synthetic construct
  misc_feature 1..20: note = chemically synthesized
  source 1..20: mol_type = other DNA
ttttacactgtcataacctt

SEQ ID NO: 51184 - DNA, 20 bp, synthetic construct
  misc_feature 1..20: note = chemically synthesized
  source 1..20: mol_type = other DNA
attggcagtgttattgggag

SEQ ID NO: 51185 - DNA, 20 bp, synthetic construct
  misc_feature 1..20: note = chemically synthesized
  source 1..20: mol_type = other DNA
taatttatgggaacttaggc

SEQ ID NO: 51186 - DNA, 20 bp, synthetic construct
  misc_feature 1..20: note = chemically synthesized
  source 1..20: mol_type = other DNA
gctcagaaaatattaaggaa

SEQ ID NO: 51187 - DNA, 20 bp, synthetic construct
  misc_feature 1..20: note = chemically synthesized
  source 1..20: mol_type = other DNA
gtgcaaccatcatcatattt

SEQ ID NO: 51188 - DNA, 20 bp, synthetic construct
  misc_feature 1..20: note = chemically synthesized
  source 1..20: mol_type = other DNA
ttctttatggttttaaaagc

SEQ ID NO: 51189 - DNA, 20 bp, synthetic construct
  misc_feature 1..20: note = chemically synthesized
  source 1..20: mol_type = other DNA
ttaaaagcaaagaaaaaggt

SEQ ID NO: 51190 - DNA, 20 bp, synthetic construct
  misc_feature 1..20: note = chemically synthesized
  source 1..20: mol_type = other DNA
gaagcccagctccctgtgat

SEQ ID NO: 51191 - DNA, 20 bp, synthetic construct
  misc_feature 1..20: note = chemically synthesized
  source 1..20: mol_type = other DNA
aggcattgacagttgcaagg

SEQ ID NO: 51192 - DNA, 20 bp, synthetic construct
  misc_feature 1..20: note = chemically synthesized
  source 1..20: mol_type = other DNA
gaccccagtctaagtgttgc

SEQ ID NO: 51193 - DNA, 20 bp, synthetic construct
  misc_feature 1..20: note = chemically synthesized
  source 1..20: mol_type = other DNA
atttatttaagccacaacta

SEQ ID NO: 51194 - DNA, 20 bp, synthetic construct
  misc_feature 1..20: note = chemically synthesized
  source 1..20: mol_type = other DNA
ttataacataatttataatt

SEQ ID NO: 51195 - DNA, 20 bp, synthetic construct
  misc_feature 1..20: note = chemically synthesized
  source 1..20: mol_type = other DNA
ttatgattttattttatcca

SEQ ID NO: 51196 - DNA, 20 bp, synthetic construct
  misc_feature 1..20: note = chemically synthesized
  source 1..20: mol_type = other DNA
ttttattttatccaaaagaa

SEQ ID NO: 51197 - DNA, 20 bp, synthetic construct
  misc_feature 1..20: note = chemically synthesized
  source 1..20: mol_type = other DNA
gccagtggcatgggtctctg

SEQ ID NO: 51198 - DNA, 20 bp, synthetic construct
  misc_feature 1..20: note = chemically synthesized
  source 1..20: mol_type = other DNA
gacatagtttttttaaatta

SEQ ID NO: 51199 - DNA, 20 bp, synthetic construct
  misc_feature 1..20: note = chemically synthesized
  source 1..20: mol_type = other DNA
cacggtgctggaatgaatgg

SEQ ID NO: 51200 - DNA, 20 bp, synthetic construct
  misc_feature 1..20: note = chemically synthesized
  source 1..20: mol_type = other DNA
tacatttgcttcttatccct

SEQ ID NO: 51201 - DNA, 20 bp, synthetic construct
  misc_feature 1..20: note = chemically synthesized
  source 1..20: mol_type = other DNA
gtcatccccattttataaac

SEQ ID NO: 51202 - DNA, 20 bp, synthetic construct
  misc_feature 1..20: note = chemically synthesized
  source 1..20: mol_type = other DNA
aattcccaaatcaaggaaat

SEQ ID NO: 51203 - DNA, 20 bp, synthetic construct
  misc_feature 1..20: note = chemically synthesized
  source 1..20: mol_type = other DNA
ctggatttaagccagatttc

SEQ ID NO: 51204 - DNA, 20 bp, synthetic construct
  misc_feature 1..20: note = chemically synthesized
  source 1..20: mol_type = other DNA
aggttaattgtttgccactt

SEQ ID NO: 51205 - DNA, 20 bp, synthetic construct
  misc_feature 1..20: note = chemically synthesized
  source 1..20: mol_type = other DNA
agaagagagaagtctggtat

SEQ ID NO: 51206 - DNA, 20 bp, synthetic construct
  misc_feature 1..20: note = chemically synthesized
  source 1..20: mol_type = other DNA
cttccaaagctagcttaggg

SEQ ID NO: 51207 - DNA, 20 bp, synthetic construct
  misc_feature 1..20: note = chemically synthesized
  source 1..20: mol_type = other DNA
cgtactacttcactttagga

SEQ ID NO: 51208 - DNA, 20 bp, synthetic construct
  misc_feature 1..20: note = chemically synthesized
  source 1..20: mol_type = other DNA
tgaatttagtggaagccatt

SEQ ID NO: 51209 - DNA, 20 bp, synthetic construct
  misc_feature 1..20: note = chemically synthesized
  source 1..20: mol_type = other DNA
aagccattcaagaaaatatc

SEQ ID NO: 51210 - DNA, 20 bp, synthetic construct
  misc_feature 1..20: note = chemically synthesized
  source 1..20: mol_type = other DNA
agccatgctcagtgagaagc

SEQ ID NO: 51211 - DNA, 20 bp, synthetic construct
  misc_feature 1..20: note = chemically synthesized
  source 1..20: mol_type = other DNA
cattcacacaccacagtgag

SEQ ID NO: 51212 - DNA, 20 bp, synthetic construct
  misc_feature 1..20: note = chemically synthesized
  source 1..20: mol_type = other DNA
atgagccctggaggtgaatc

SEQ ID NO: 51213 - DNA, 20 bp, synthetic construct
  misc_feature 1..20: note = chemically synthesized
  source 1..20: mol_type = other DNA
gaaaaatcatcaggttaaaa

SEQ ID NO: 51214 - DNA, 20 bp, synthetic construct
  misc_feature 1..20: note = chemically synthesized
  source 1..20: mol_type = other DNA
ttgaagtcacactgtgagct

SEQ ID NO: 51215 - DNA, 20 bp, synthetic construct
  misc_feature 1..20: note = chemically synthesized
  source 1..20: mol_type = other DNA
cctggaaaagagagttcaaa

SEQ ID NO: 51216 - DNA, 20 bp, synthetic construct
  misc_feature 1..20: note = chemically synthesized
  source 1..20: mol_type = other DNA
tgctttttagtggattaggt

SEQ ID NO: 51217 - DNA, 20 bp, synthetic construct
  misc_feature 1..20: note = chemically synthesized
  source 1..20: mol_type = other DNA
gaggtcaggacaggcctttc

SEQ ID NO: 51218 - DNA, 20 bp, synthetic construct
  misc_feature 1..20: note = chemically synthesized
  source 1..20: mol_type = other DNA
aggacaggcctttctgagaa

SEQ ID NO: 51219 - DNA, 20 bp, synthetic construct
  misc_feature 1..20: note = chemically synthesized
  source 1..20: mol_type = other DNA
ccaccctttgccacaaccag

SEQ ID NO: 51220 - DNA, 20 bp, synthetic construct
  misc_feature 1..20: note = chemically synthesized
  source 1..20: mol_type = other DNA
gttgcctcagatttgatctc

SEQ ID NO: 51221 - DNA, 20 bp, synthetic construct
  misc_feature 1..20: note = chemically synthesized
  source 1..20: mol_type = other DNA
tacaaccaatgcacatattg

SEQ ID NO: 51222 - DNA, 20 bp, synthetic construct
  misc_feature 1..20: note = chemically synthesized
  source 1..20: mol_type = other DNA
gcaggaggtggaagcccctg

SEQ ID NO: 51223 - DNA, 20 bp, synthetic construct
  misc_feature 1..20: note = chemically synthesized
  source 1..20: mol_type = other DNA
ccctgagagaatggaggtct

SEQ ID NO: 51224 - DNA, 20 bp, synthetic construct
  misc_feature 1..20: note = chemically synthesized
  source 1..20: mol_type = other DNA
ggaggagggggaatacctag

SEQ ID NO: 51225 - DNA, 20 bp, synthetic construct
  misc_feature 1..20: note = chemically synthesized
  source 1..20: mol_type = other DNA
agggggaatacctaggtaga

SEQ ID NO: 51226 - DNA, 20 bp, synthetic construct
  misc_feature 1..20: note = chemically synthesized
  source 1..20: mol_type = other DNA
ctcactgtgcagttaacttt

SEQ ID NO: 51227 - DNA, 20 bp, synthetic construct
  misc_feature 1..20: note = chemically synthesized
  source 1..20: mol_type = other DNA
tagggagggaagagggcaaa

SEQ ID NO: 51228 - DNA, 20 bp, synthetic construct
  misc_feature 1..20: note = chemically synthesized
  source 1..20: mol_type = other DNA
agaagcaatgcagccattac

SEQ ID NO: 51229 - DNA, 20 bp, synthetic construct
  misc_feature 1..20: note = chemically synthesized
  source 1..20: mol_type = other DNA
acacctgtatcacaggtgtt

SEQ ID NO: 51230 - DNA, 20 bp, synthetic construct
  misc_feature 1..20: note = chemically synthesized
  source 1..20: mol_type = other DNA
tatcacaggtgttaaagaaa

SEQ ID NO: 51231 - DNA, 20 bp, synthetic construct
  misc_feature 1..20: note = chemically synthesized
  source 1..20: mol_type = other DNA
accgttaatgcccttgggct

SEQ ID NO: 51232 - DNA, 20 bp, synthetic construct
  misc_feature 1..20: note = chemically synthesized
  source 1..20: mol_type = other DNA
acctccagcacacagcaggg

SEQ ID NO: 51233 - DNA, 20 bp, synthetic construct
  misc_feature 1..20: note = chemically synthesized
  source 1..20: mol_type = other DNA
gctgcccccaagctgtagag

SEQ ID NO: 51234 - DNA, 20 bp, synthetic construct
  misc_feature 1..20: note = chemically synthesized
  source 1..20: mol_type = other DNA
agagccagaatataaagctg

SEQ ID NO: 51235 - DNA, 20 bp, synthetic construct
  misc_feature 1..20: note = chemically synthesized
  source 1..20: mol_type = other DNA
ccagaagtggttcttgagga

SEQ ID NO: 51236 - DNA, 20 bp, synthetic construct
  misc_feature 1..20: note = chemically synthesized
  source 1..20: mol_type = other DNA
tgattgctcctaagttctct

SEQ ID NO: 51237 - DNA, 20 bp, synthetic construct
  misc_feature 1..20: note = chemically synthesized
  source 1..20: mol_type = other DNA
gttctctggagaaagagatg

SEQ ID NO: 51238 - DNA, 20 bp, synthetic construct
  misc_feature 1..20: note = chemically synthesized
  source 1..20: mol_type = other DNA
atgagagttttaactcctgt

SEQ ID NO: 51239 - DNA, 20 bp, synthetic construct
  misc_feature 1..20: note = chemically synthesized
  source 1..20: mol_type = other DNA
ctgatgaaacttttttgcca

SEQ ID NO: 51240 - DNA, 20 bp, synthetic construct
  misc_feature 1..20: note = chemically synthesized
  source 1..20: mol_type = other DNA
aagctttctaatttatattg

SEQ ID NO: 51241 - DNA, 20 bp, synthetic construct
  misc_feature 1..20: note = chemically synthesized
  source 1..20: mol_type = other DNA
taatgttgcagctcggggac

SEQ ID NO: 51242 - DNA, 20 bp, synthetic construct
  misc_feature 1..20: note = chemically synthesized
  source 1..20: mol_type = other DNA
cagcagaggcaaagcagcca

SEQ ID NO: 51243 - DNA, 20 bp, synthetic construct
  misc_feature 1..20: note = chemically synthesized
  source 1..20: mol_type = other DNA
tataaacaaaaaactgccag

SEQ ID NO: 51244 - DNA, 20 bp, synthetic construct
  misc_feature 1..20: note = chemically synthesized
  source 1..20: mol_type = other DNA
ctaatctgaattataaaaac

SEQ ID NO: 51245 - DNA, 20 bp, synthetic construct
  misc_feature 1..20: note = chemically synthesized
  source 1..20: mol_type = other DNA
ccagggtaactgtgtgtact

SEQ ID NO: 51246 - DNA, 20 bp, synthetic construct
  misc_feature 1..20: note = chemically synthesized
  source 1..20: mol_type = other DNA
aagggaagtaatgagacatt

SEQ ID NO: 51247 - DNA, 20 bp, synthetic construct
  misc_feature 1..20: note = chemically synthesized
  source 1..20: mol_type = other DNA
atagacatacttattagctg

SEQ ID NO: 51248 - DNA, 20 bp, synthetic construct
  misc_feature 1..20: note = chemically synthesized
  source 1..20: mol_type = other DNA
gccattagagctgtctctac

SEQ ID NO: 51249 - DNA, 20 bp, synthetic construct
  misc_feature 1..20: note = chemically synthesized
  source 1..20: mol_type = other DNA
cgtttggcccctcttacaac

SEQ ID NO: 51250 - DNA, 20 bp, synthetic construct
  misc_feature 1..20: note = chemically synthesized
  source 1..20: mol_type = other DNA
atgcatgtgtacacttgtgc

SEQ ID NO: 51251 - DNA, 20 bp, synthetic construct
  misc_feature 1..20: note = chemically synthesized
  source 1..20: mol_type = other DNA
gtgttaatttgctcaagcaa

SEQ ID NO: 51252 - DNA, 20 bp, synthetic construct
  misc_feature 1..20: note = chemically synthesized
  source 1..20: mol_type = other DNA
actgtaagtcagaaatgagc

SEQ ID NO: 51253 - DNA, 20 bp, synthetic construct
  misc_feature 1..20: note = chemically synthesized
  source 1..20: mol_type = other DNA
aactctttctctacaggagt

SEQ ID NO: 51254 - DNA, 20 bp, synthetic construct
  misc_feature 1..20: note = chemically synthesized
  source 1..20: mol_type = other DNA
tcagccaacaccagaagtcc

SEQ ID NO: 51255 - DNA, 20 bp, synthetic construct
  misc_feature 1..20: note = chemically synthesized
  source 1..20: mol_type = other DNA
ctctgggagcttcaccccac

SEQ ID NO: 51256 - DNA, 20 bp, synthetic construct
  misc_feature 1..20: note = chemically synthesized
  source 1..20: mol_type = other DNA
taggggcagggaccagtgca

SEQ ID NO: 51257 - DNA, 20 bp, synthetic construct
  misc_feature 1..20: note = chemically synthesized
  source 1..20: mol_type = other DNA
atttaatatgctctatgctg

SEQ ID NO: 51258 - DNA, 20 bp, synthetic construct
  misc_feature 1..20: note = chemically synthesized
  source 1..20: mol_type = other DNA
tatagctcacagtgtgactt

SEQ ID NO: 51259 - DNA, 20 bp, synthetic construct
  misc_feature 1..20: note = chemically synthesized
  source 1..20: mol_type = other DNA
catgttgctaggaaatatcc

SEQ ID NO: 51260 - DNA, 20 bp, synthetic construct
  misc_feature 1..20: note = chemically synthesized
  source 1..20: mol_type = other DNA
aatgtgccccccaggtcgat

SEQ ID NO: 51261 - DNA, 20 bp, synthetic construct
  misc_feature 1..20: note = chemically synthesized
  source 1..20: mol_type = other DNA
catagacaccaatttcccca

SEQ ID NO: 51262 - DNA, 20 bp, synthetic construct
  misc_feature 1..20: note = chemically synthesized
  source 1..20: mol_type = other DNA
aaaccaaagcatgcccacta

SEQ ID NO: 51263 - DNA, 20 bp, synthetic construct
  misc_feature 1..20: note = chemically synthesized
  source 1..20: mol_type = other DNA
aaataattcttataatttaa

SEQ ID NO: 51264 - DNA, 20 bp, synthetic construct
  misc_feature 1..20: note = chemically synthesized
  source 1..20: mol_type = other DNA
gacaagcctgggcaacatgc

SEQ ID NO: 51265 - DNA, 20 bp, synthetic construct
  misc_feature 1..20: note = chemically synthesized
  source 1..20: mol_type = other DNA
taaataaatatttttaaaaa

SEQ ID NO: 51266 - DNA, 20 bp, synthetic construct
  misc_feature 1..20: note = chemically synthesized
  source 1..20: mol_type = other DNA
gttaggaggctcctcccgtt

SEQ ID NO: 51267 - DNA, 20 bp, synthetic construct
  misc_feature 1..20: note = chemically synthesized
  source 1..20: mol_type = other DNA
catataagagtctatgttcc

SEQ ID NO: 51268 - DNA, 20 bp, synthetic construct
  misc_feature 1..20: note = chemically synthesized
  source 1..20: mol_type = other DNA
tttacctttttctttgcttt

SEQ ID NO: 51269 - DNA, 20 bp, synthetic construct
  misc_feature 1..20: note = chemically synthesized
  source 1..20: mol_type = other DNA
gacagtgtaaaatgtcacta

SEQ ID NO: 51270 - DNA, 20 bp, synthetic construct
  misc_feature 1..20: note = chemically synthesized
  source 1..20: mol_type = other DNA
gttgtgtttattcttttgtg

SEQ ID NO: 51271 - DNA, 20 bp, synthetic construct
  misc_feature 1..20: note = chemically synthesized
  source 1..20: mol_type = other DNA
gcaaacatcctgataatggt

SEQ ID NO: 51272 - DNA, 20 bp, synthetic construct
  misc_feature 1..20: note = chemically synthesized
  source 1..20: mol_type = other DNA
aaacatgaaggggagagcag

SEQ ID NO: 51273 - DNA, 20 bp, synthetic construct
  misc_feature 1..20: note = chemically synthesized
  source 1..20: mol_type = other DNA
aactagaccatgaggtgcca

SEQ ID NO: 51274 - DNA, 20 bp, synthetic construct
  misc_feature 1..20: note = chemically synthesized
  source 1..20: mol_type = other DNA
aagctgggcttgcaaaatta

SEQ ID NO: 51275 - DNA, 20 bp, synthetic construct
  misc_feature 1..20: note = chemically synthesized
  source 1..20: mol_type = other DNA
ccctgggtgtgtccatctgg

SEQ ID NO: 51276 - DNA, 20 bp, synthetic construct
  misc_feature 1..20: note = chemically synthesized
  source 1..20: mol_type = other DNA
atgaagatcatagcactata

SEQ ID NO: 51277 - DNA, 20 bp, synthetic construct
  misc_feature 1..20: note = chemically synthesized
  source 1..20: mol_type = other DNA
tacaaaaagtctgaaaatat

SEQ ID NO: 51278 - DNA, 20 bp, synthetic construct
  misc_feature 1..20: note = chemically synthesized
  source 1..20: mol_type = other DNA
taacataatttataattaca

SEQ ID NO: 51279 - DNA, 20 bp, synthetic construct
  misc_feature 1..20: note = chemically synthesized
  source 1..20: mol_type = other DNA
agcctgctctgctacatttc

SEQ ID NO: 51280 - DNA, 20 bp, synthetic construct
  misc_feature 1..20: note = chemically synthesized
  source 1..20: mol_type = other DNA
gatgcctatcaacaccttgg

SEQ ID NO: 51281 - DNA, 20 bp, synthetic construct
  misc_feature 1..20: note = chemically synthesized
  source 1..20: mol_type = other DNA
agaaagagttgaaattgtga

SEQ ID NO: 51282 - DNA, 20 bp, synthetic construct
  misc_feature 1..20: note = chemically synthesized
  source 1..20: mol_type = other DNA
ctacttgatttatataaaca

SEQ ID NO: 51283 - DNA, 20 bp, synthetic construct
  misc_feature 1..20: note = chemically synthesized
  source 1..20: mol_type = other DNA
taaagactaatctgaattat

SEQ ID NO: 51284 - DNA, 20 bp, synthetic construct
  misc_feature 1..20: note = chemically synthesized
  source 1..20: mol_type = other DNA
gacgttgattccagggtacc

SEQ ID NO: 51285 - DNA, 20 bp, synthetic construct
  misc_feature 1..20: note = chemically synthesized
  source 1..20: mol_type = other DNA
cctagaaaaataaaaaaatc

SEQ ID NO: 51286 - DNA, 20 bp, synthetic construct
  misc_feature 1..20: note = chemically synthesized
  source 1..20: mol_type = other DNA
ccacaccctcacagacataa

SEQ ID NO: 51287 - DNA, 20 bp, synthetic construct
  misc_feature 1..20: note = chemically synthesized
  source 1..20: mol_type = other DNA
tgctgatatgaacaacactt

SEQ ID NO: 51288 - DNA, 20 bp, synthetic construct
  misc_feature 1..20: note = chemically synthesized
  source 1..20: mol_type = other DNA
caaaatcctagaggtctcca

SEQ ID NO: 51289 - DNA, 20 bp, synthetic construct
  misc_feature 1..20: note = chemically synthesized
  source 1..20: mol_type = other DNA
tcatgtggcccaaatggcag

SEQ ID NO: 51290 - DNA, 20 bp, synthetic construct
  misc_feature 1..20: note = chemically synthesized
  source 1..20: mol_type = other DNA
cagctttcacagcagcctgg

SEQ ID NO: 51291 - DNA, 20 bp, synthetic construct
  misc_feature 1..20: note = chemically synthesized
  source 1..20: mol_type = other DNA
gaggggccaaacgcagcaag

SEQ ID NO: 51292 - DNA, 20 bp, synthetic construct
  misc_feature 1..20: note = chemically synthesized
  source 1..20: mol_type = other DNA
tagaaagtccctaaatttta

SEQ ID NO: 51293 - DNA, 20 bp, synthetic construct
  misc_feature 1..20: note = chemically synthesized
  source 1..20: mol_type = other DNA
atgtctcaccaataagttca

SEQ ID NO: 51294 - DNA, 20 bp, synthetic construct
  misc_feature 1..20: note = chemically synthesized
  source 1..20: mol_type = other DNA
agcgagcaaggtctctccaa

SEQ ID NO: 51295 - DNA, 20 bp, synthetic construct
  misc_feature 1..20: note = chemically synthesized
  source 1..20: mol_type = other DNA
ggccttgtcagctgaaggca

SEQ ID NO: 51296 - DNA, 20 bp, synthetic construct
  misc_feature 1..20: note = chemically synthesized
  source 1..20: mol_type = other DNA
caattggagtcaccacttgg

SEQ ID NO: 51297 - DNA, 20 bp, synthetic construct
  misc_feature 1..20: note = chemically synthesized
  source 1..20: mol_type = other DNA
cagtccctccagggatggga

SEQ ID NO: 51298 - DNA, 20 bp, synthetic construct
  misc_feature 1..20: note = chemically synthesized
  source 1..20: mol_type = other DNA
ctccagggatgggatattgt

SEQ ID NO: 51299 - DNA, 20 bp, synthetic construct
  misc_feature 1..20: note = chemically synthesized
  source 1..20: mol_type = other DNA
ttctaggtagagacagctct

SEQ ID NO: 51300 - DNA, 20 bp, synthetic construct
  misc_feature 1..20: note = chemically synthesized
  source 1..20: mol_type = other DNA
gtagagacagctctaatggc

SEQ ID NO: 51301 - DNA, 20 bp, synthetic construct
  misc_feature 1..20: note = chemically synthesized
  source 1..20: mol_type = other DNA
ctttaactggggaaccacaa

SEQ ID NO: 51302 - DNA, 20 bp, synthetic construct
  misc_feature 1..20: note = chemically synthesized
  source 1..20: mol_type = other DNA
gtaacaggttcgagtctgga

SEQ ID NO: 51303 - DNA, 20 bp, synthetic construct
  misc_feature 1..20: note = chemically synthesized
  source 1..20: mol_type = other DNA
tctggaaattgattgagggc

SEQ ID NO: 51304 - DNA, 20 bp, synthetic construct
  misc_feature 1..20: note = chemically synthesized
  source 1..20: mol_type = other DNA
ttgattgagggcccatgatt

SEQ ID NO: 51305 - DNA, 20 bp, synthetic construct
  misc_feature 1..20: note = chemically synthesized
  source 1..20: mol_type = other DNA
atgattctctgtttttataa

SEQ ID NO: 51306 - DNA, 20 bp, synthetic construct
  misc_feature 1..20: note = chemically synthesized
  source 1..20: mol_type = other DNA
gtctttagtccattctacct

SEQ ID NO: 51307 - DNA, 20 bp, synthetic construct
  misc_feature 1..20: note = chemically synthesized
  source 1..20: mol_type = other DNA
gtccattctacctggcagtt

SEQ ID NO: 51308 - DNA, 20 bp, synthetic construct
  misc_feature 1..20: note = chemically synthesized
  source 1..20: mol_type = other DNA
ataaatcaagtaggaataca

SEQ ID NO: 51309 - DNA, 20 bp, synthetic construct
  misc_feature 1..20: note = chemically synthesized
  source 1..20: mol_type = other DNA
caatttcacttctaggaaca

SEQ ID NO: 51310 - DNA, 20 bp, synthetic construct
  misc_feature 1..20: note = chemically synthesized
  source 1..20: mol_type = other DNA
atgagtcagactattctgat

SEQ ID NO: 51311 - DNA, 20 bp, synthetic construct
  misc_feature 1..20: note = chemically synthesized
  source 1..20: mol_type = other DNA
gctctcacaaatctatttca

SEQ ID NO: 51312 - DNA, 20 bp, synthetic construct
  misc_feature 1..20: note = chemically synthesized
  source 1..20: mol_type = other DNA
tgcctcagcctcccaagtag

SEQ ID NO: 51313 - DNA, 20 bp, synthetic construct
  misc_feature 1..20: note = chemically synthesized
  source 1..20: mol_type = other DNA
ttttgtatttttagcagaga

SEQ ID NO: 51314 - DNA, 20 bp, synthetic construct
  misc_feature 1..20: note = chemically synthesized
  source 1..20: mol_type = other DNA
cgcccccgcctcccaaggtg

SEQ ID NO: 51315 - DNA, 20 bp, synthetic construct
  misc_feature 1..20: note = chemically synthesized
  source 1..20: mol_type = other DNA
agtagggccaaaccaataaa

SEQ ID NO: 51316 - DNA, 20 bp, synthetic construct
  misc_feature 1..20: note = chemically synthesized
  source 1..20: mol_type = other DNA
atccattcccatgcctgttc

SEQ ID NO: 51317 - DNA, 20 bp, synthetic construct
  misc_feature 1..20: note = chemically synthesized
  source 1..20: mol_type = other DNA
atttctgccaatataaatta

SEQ ID NO: 51318 - DNA, 20 bp, synthetic construct
  misc_feature 1..20: note = chemically synthesized
  source 1..20: mol_type = other DNA
cactgttgcctcaagcagtg

SEQ ID NO: 51319 - DNA, 20 bp, synthetic construct
  misc_feature 1..20: note = chemically synthesized
  source 1..20: mol_type = other DNA
accactactggggatgggga

SEQ ID NO: 51320 - DNA, 20 bp, synthetic construct
  misc_feature 1..20: note = chemically synthesized
  source 1..20: mol_type = other DNA
gaaactgtttcttctggcaa

SEQ ID NO: 51321 - DNA, 20 bp, synthetic construct
  misc_feature 1..20: note = chemically synthesized
  source 1..20: mol_type = other DNA
gagttcacaaactcagtgtc

SEQ ID NO: 51322 - DNA, 20 bp, synthetic construct
  misc_feature 1..20: note = chemically synthesized
  source 1..20: mol_type = other DNA
agatcagctactcgcatgat

SEQ ID NO: 51323 - DNA, 20 bp, synthetic construct
  misc_feature 1..20: note = chemically synthesized
  source 1..20: mol_type = other DNA
ctcgcatgataacagcttgt

SEQ ID NO: 51324 - DNA, 20 bp, synthetic construct
  misc_feature 1..20: note = chemically synthesized
  source 1..20: mol_type = other DNA
ctctcattcagggcaatctt

SEQ ID NO: 51325 - DNA, 20 bp, synthetic construct
  misc_feature 1..20: note = chemically synthesized
  source 1..20: mol_type = other DNA
tagcagatttgtggctcagt

SEQ ID NO: 51326 - DNA, 20 bp, synthetic construct
  misc_feature 1..20: note = chemically synthesized
  source 1..20: mol_type = other DNA
tctagagggacagaactaat

SEQ ID NO: 51327 - DNA, 20 bp, synthetic construct
  misc_feature 1..20: note = chemically synthesized
  source 1..20: mol_type = other DNA
atagatatactcacacaaag

SEQ ID NO: 51328 - DNA, 20 bp, synthetic construct
  misc_feature 1..20: note = chemically synthesized
  source 1..20: mol_type = other DNA
ttattaagtggtattaactc

SEQ ID NO: 51329 - DNA, 20 bp, synthetic construct
  misc_feature 1..20: note = chemically synthesized
  source 1..20: mol_type = other DNA
tagcctttttacatttttct

SEQ ID NO: 51330 - DNA, 20 bp, synthetic construct
  misc_feature 1..20: note = chemically synthesized
  source 1..20: mol_type = other DNA
ccagctttatattctggctc

SEQ ID NO: 51331 - DNA, 20 bp, synthetic construct
  misc_feature 1..20: note = chemically synthesized
  source 1..20: mol_type = other DNA
cagcaggggcaggggcctca

SEQ ID NO: 51332 - DNA, 20 bp, synthetic construct
  misc_feature 1..20: note = chemically synthesized
  source 1..20: mol_type = other DNA
aaggactttcagtcacctct

SEQ ID NO: 51333 - DNA, 20 bp, synthetic construct
  misc_feature 1..20: note = chemically synthesized
  source 1..20: mol_type = other DNA
agaggggctgtgggttgtct

SEQ ID NO: 51334 - DNA, 20 bp, synthetic construct
  misc_feature 1..20: note = chemically synthesized
  source 1..20: mol_type = other DNA
tgagcccatactttaatctc

SEQ ID NO: 51335 - DNA, 20 bp, synthetic construct
  misc_feature 1..20: note = chemically synthesized
  source 1..20: mol_type = other DNA
tttttaaaaatcatatttat

SEQ ID NO: 51336 - DNA, 20 bp, synthetic construct
  misc_feature 1..20: note = chemically synthesized
  source 1..20: mol_type = other DNA
tattaagaatacaagaagta

SEQ ID NO: 51337 - DNA, 20 bp, synthetic construct
  misc_feature 1..20: note = chemically synthesized
  source 1..20: mol_type = other DNA
aatacaagaagtacaatgtt

SEQ ID NO: 51338 - DNA, 20 bp, synthetic construct
  misc_feature 1..20: note = chemically synthesized
  source 1..20: mol_type = other DNA
ttctttaacacctgtgatac

SEQ ID NO: 51339 - DNA, 20 bp, synthetic construct
  misc_feature 1..20: note = chemically synthesized
  source 1..20: mol_type = other DNA
tgaattctacgtaatggctg

SEQ ID NO: 51340 - DNA, 20 bp, synthetic construct
  misc_feature 1..20: note = chemically synthesized
  source 1..20: mol_type = other DNA
tgcaggacttgggtaatctc

SEQ ID NO: 51341 - DNA, 20 bp, synthetic construct
  misc_feature 1..20: note = chemically synthesized
  source 1..20: mol_type = other DNA
acttgggtaatctctggggt

SEQ ID NO: 51342 - DNA, 20 bp, synthetic construct
  misc_feature 1..20: note = chemically synthesized
  source 1..20: mol_type = other DNA
ctccagacctccattctctc

SEQ ID NO: 51343 - DNA, 20 bp, synthetic construct
  misc_feature 1..20: note = chemically synthesized
  source 1..20: mol_type = other DNA
aaatcttaaataagaataaa

SEQ ID NO: 51344 - DNA, 20 bp, synthetic construct
  misc_feature 1..20: note = chemically synthesized
  source 1..20: mol_type = other DNA
taagaataaatcatgtttgc

SEQ ID NO: 51345 - DNA, 20 bp, synthetic construct
  misc_feature 1..20: note = chemically synthesized
  source 1..20: mol_type = other DNA
catcagtggcaactgtgttg

SEQ ID NO: 51346 - DNA, 20 bp, synthetic construct
  misc_feature 1..20: note = chemically synthesized
  source 1..20: mol_type = other DNA
tagaaatgaaccttggaggc

SEQ ID NO: 51347 - DNA, 20 bp, synthetic construct
  misc_feature 1..20: note = chemically synthesized
  source 1..20: mol_type = other DNA
aatgaaccttggaggccatt

SEQ ID NO: 51348 - DNA, 20 bp, synthetic construct
  misc_feature 1..20: note = chemically synthesized
  source 1..20: mol_type = other DNA
caaagaaggccatttttgta

SEQ ID NO: 51349 - DNA, 20 bp, synthetic construct
  misc_feature 1..20: note = chemically synthesized
  source 1..20: mol_type = other DNA
ccactattagttggggagaa

SEQ ID NO: 51350 - DNA, 20 bp, synthetic construct
  misc_feature 1..20: note = chemically synthesized
  source 1..20: mol_type = other DNA
ttccaaggtgttgataggca

SEQ ID NO: 51351 - DNA, 20 bp, synthetic construct
  misc_feature 1..20: note = chemically synthesized
  source 1..20: mol_type = other DNA
gaacctgggaccaatactgc

SEQ ID NO: 51352 - DNA, 20 bp, synthetic construct
  misc_feature 1..20: note = chemically synthesized
  source 1..20: mol_type = other DNA
aggcaacaaatctgttcaaa

SEQ ID NO: 51353 - DNA, 20 bp, synthetic construct
  misc_feature 1..20: note = chemically synthesized
  source 1..20: mol_type = other DNA
aggctccttaggacacctgg

SEQ ID NO: 51354 - DNA, 20 bp, synthetic construct
  misc_feature 1..20: note = chemically synthesized
  source 1..20: mol_type = other DNA
tccatctctggcacaaaatg

SEQ ID NO: 51355 - DNA, 20 bp, synthetic construct
  misc_feature 1..20: note = chemically synthesized
  source 1..20: mol_type = other DNA
ggctaataaaatgaagatag

SEQ ID NO: 51356 - DNA, 20 bp, synthetic construct
  misc_feature 1..20: note = chemically synthesized
  source 1..20: mol_type = other DNA
gatgacacactgcagagaac

SEQ ID NO: 51357 - DNA, 20 bp, synthetic construct
  misc_feature 1..20: note = chemically synthesized
  source 1..20: mol_type = other DNA
atccagtagaaaggcagatg

SEQ ID NO: 51358 - DNA, 20 bp, synthetic construct
  misc_feature 1..20: note = chemically synthesized
  source 1..20: mol_type = other DNA
caaggaggaggatgcacgct

SEQ ID NO: 51359 - DNA, 20 bp, synthetic construct
  misc_feature 1..20: note = chemically synthesized
  source 1..20: mol_type = other DNA
aatatgctctatgctggaaa

SEQ ID NO: 51360 - DNA, 20 bp, synthetic construct
  misc_feature 1..20: note = chemically synthesized
  source 1..20: mol_type = other DNA
atatccatgtcttcaccccg

SEQ ID NO: 51361 - DNA, 20 bp, synthetic construct
  misc_feature 1..20: note = chemically synthesized
  source 1..20: mol_type = other DNA
actctcttttccaggaagag

SEQ ID NO: 51362 - DNA, 20 bp, synthetic construct
  misc_feature 1..20: note = chemically synthesized
  source 1..20: mol_type = other DNA
aaacacacaataaattaata

SEQ ID NO: 51363 - DNA, 20 bp, synthetic construct
  misc_feature 1..20: note = chemically synthesized
  source 1..20: mol_type = other DNA
gttcagttaaacattttgaa

SEQ ID NO: 51364 - DNA, 20 bp, synthetic construct
  misc_feature 1..20: note = chemically synthesized
  source 1..20: mol_type = other DNA
cctgtaactgtgtcatttta

SEQ ID NO: 51365 - DNA, 20 bp, synthetic construct
  misc_feature 1..20: note = chemically synthesized
  source 1..20: mol_type = other DNA
caatttttctttttttaacc

SEQ ID NO: 51366 - DNA, 20 bp, synthetic construct
  misc_feature 1..20: note = chemically synthesized
  source 1..20: mol_type = other DNA
tgatgatttttccacaatcc

SEQ ID NO: 51367 - DNA, 20 bp, synthetic construct
  misc_feature 1..20: note = chemically synthesized
  source 1..20: mol_type = other DNA
tttccacaatccttttgttt

SEQ ID NO: 51368 - DNA, 20 bp, synthetic construct
  misc_feature 1..20: note = chemically synthesized
  source 1..20: mol_type = other DNA
ctccagggctcatatggcaa

SEQ ID NO: 51369 - DNA, 20 bp, synthetic construct
  misc_feature 1..20: note = chemically synthesized
  source 1..20: mol_type = other DNA
atatggcaatggggatttaa

SEQ ID NO: 51370 - DNA, 20 bp, synthetic construct
  misc_feature 1..20: note = chemically synthesized
  source 1..20: mol_type = other DNA
cttagcaatttgtgaataga

SEQ ID NO: 51371 - DNA, 20 bp, synthetic construct
  misc_feature 1..20: note = chemically synthesized
  source 1..20: mol_type = other DNA
tttgtgaatagaagatgttt

SEQ ID NO: 51372 - DNA, 20 bp, synthetic construct
  misc_feature 1..20: note = chemically synthesized
  source 1..20: mol_type = other DNA
gataacacgtccacagaaag

SEQ ID NO: 51373 - DNA, 20 bp, synthetic construct
  misc_feature 1..20: note = chemically synthesized
  source 1..20: mol_type = other DNA
cagaaagcctggctttccaa

SEQ ID NO: 51374 - DNA, 20 bp, synthetic construct
  misc_feature 1..20: note = chemically synthesized
  source 1..20: mol_type = other DNA
atcagagaatgtgcccccca

SEQ ID NO: 51375 - DNA, 20 bp, synthetic construct
  misc_feature 1..20: note = chemically synthesized
  source 1..20: mol_type = other DNA
atatgttaatcctgtggcag

SEQ ID NO: 51376 - DNA, 20 bp, synthetic construct
  misc_feature 1..20: note = chemically synthesized
  source 1..20: mol_type = other DNA
aagttcacagtgatctacat

SEQ ID NO: 51377 - DNA, 20 bp, synthetic construct
  misc_feature 1..20: note = chemically synthesized
  source 1..20: mol_type = other DNA
accaatttccccaaaaaact

SEQ ID NO: 51378 - DNA, 20 bp, synthetic construct
  misc_feature 1..20: note = chemically synthesized
  source 1..20: mol_type = other DNA
ttttctttgatattttcttg

SEQ ID NO: 51379 - DNA, 20 bp, synthetic construct
  misc_feature 1..20: note = chemically synthesized
  source 1..20: mol_type = other DNA
atggcttccactaaattcaa

SEQ ID NO: 51380 - DNA, 20 bp, synthetic construct
  misc_feature 1..20: note = chemically synthesized
  source 1..20: mol_type = other DNA
taaaattttatctggtaatt

SEQ ID NO: 51381 - DNA, 20 bp, synthetic construct
  misc_feature 1..20: note = chemically synthesized
  source 1..20: mol_type = other DNA
gcaagttcatctaactatgt

SEQ ID NO: 51382 - DNA, 20 bp, synthetic construct
  misc_feature 1..20: note = chemically synthesized
  source 1..20: mol_type = other DNA
gatggaactcctgagttcac

SEQ ID NO: 51383 - DNA, 20 bp, synthetic construct
  misc_feature 1..20: note = chemically synthesized
  source 1..20: mol_type = other DNA
actacaaaactctcaccctc

SEQ ID NO: 51384 - DNA, 20 bp, synthetic construct
  misc_feature 1..20: note = chemically synthesized
  source 1..20: mol_type = other DNA
tgctgcatttcttcccctaa

SEQ ID NO: 51385 - DNA, 20 bp, synthetic construct
  misc_feature 1..20: note = chemically synthesized
  source 1..20: mol_type = other DNA
accagacttctctcttctta

SEQ ID NO: 51386 - DNA, 20 bp, synthetic construct
  misc_feature 1..20: note = chemically synthesized
  source 1..20: mol_type = other DNA
tgctcttcagttacattgga

SEQ ID NO: 51387 - DNA, 20 bp, synthetic construct
  misc_feature 1..20: note = chemically synthesized
  source 1..20: mol_type = other DNA
ttcagttacattggaatgtg

SEQ ID NO: 51388 - DNA, 20 bp, synthetic construct
  misc_feature 1..20: note = chemically synthesized
  source 1..20: mol_type = other DNA
gatgaaaaagtgagaagagc

SEQ ID NO: 51389 - DNA, 20 bp, synthetic construct
  misc_feature 1..20: note = chemically synthesized
  source 1..20: mol_type = other DNA
cctagattttttcttggaaa

SEQ ID NO: 51390 - DNA, 20 bp, synthetic construct
  misc_feature 1..20: note = chemically synthesized
  source 1..20: mol_type = other DNA
cttggaaatctggcttaaat

SEQ ID NO: 51391 - DNA, 20 bp, synthetic construct
  misc_feature 1..20: note = chemically synthesized
  source 1..20: mol_type = other DNA
aaatccaggtttctttattt

SEQ ID NO: 51392 - DNA, 20 bp, synthetic construct
  misc_feature 1..20: note = chemically synthesized
  source 1..20: mol_type = other DNA
atttggtcacgagacaaata

SEQ ID NO: 51393 - DNA, 20 bp, synthetic construct
  misc_feature 1..20: note = chemically synthesized
  source 1..20: mol_type = other DNA
aataacatgattttcctaag

SEQ ID NO: 51394 - DNA, 20 bp, synthetic construct
  misc_feature 1..20: note = chemically synthesized
  source 1..20: mol_type = other DNA
attttcctaagtctagattt

SEQ ID NO: 51395 - DNA, 20 bp, synthetic construct
  misc_feature 1..20: note = chemically synthesized
  source 1..20: mol_type = other DNA
acatattcaaagagttattt

SEQ ID NO: 51396 - DNA, 20 bp, synthetic construct
  misc_feature 1..20: note = chemically synthesized
  source 1..20: mol_type = other DNA
atgaaactgagaaccaagcg

SEQ ID NO: 51397 - DNA, 20 bp, synthetic construct
  misc_feature 1..20: note = chemically synthesized
  source 1..20: mol_type = other DNA
ccatcatgtaggcacactct

SEQ ID NO: 51398 - DNA, 20 bp, synthetic construct
  misc_feature 1..20: note = chemically synthesized
  source 1..20: mol_type = other DNA
taagaatttttcaatcatat

SEQ ID NO: 51399 - DNA, 20 bp, synthetic construct
  misc_feature 1..20: note = chemically synthesized
  source 1..20: mol_type = other DNA
atttaaaaaaactatgtctt

SEQ ID NO: 51400 - DNA, 20 bp, synthetic construct
  misc_feature 1..20: note = chemically synthesized
  source 1..20: mol_type = other DNA
accagatagtcaaattaagt

SEQ ID NO: 51401 - DNA, 20 bp, synthetic construct
  misc_feature 1..20: note = chemically synthesized
  source 1..20: mol_type = other DNA
cacccctagaccttcatctt

SEQ ID NO: 51402 - DNA, 20 bp, synthetic construct
  misc_feature 1..20: note = chemically synthesized
  source 1..20: mol_type = other DNA
ccttcatctttcctgattag

SEQ ID NO: 51403 - DNA, 20 bp, synthetic construct
  misc_feature 1..20: note = chemically synthesized
  source 1..20: mol_type = other DNA
ctgcacatccatagcctccc

SEQ ID NO: 51404 - DNA, 20 bp, synthetic construct
  misc_feature 1..20: note = chemically synthesized
  source 1..20: mol_type = other DNA
tagacacaaccctttcaggt

SEQ ID NO: 51405 - DNA, 20 bp, synthetic construct
  misc_feature 1..20: note = chemically synthesized
  source 1..20: mol_type = other DNA
tatttattcctagtgaactc

SEQ ID NO: 51406 - DNA, 20 bp, synthetic construct
  misc_feature 1..20: note = chemically synthesized
  source 1..20: mol_type = other DNA
cagatggatcacctgaggcc

SEQ ID NO: 51407 - DNA, 20 bp, synthetic construct
  misc_feature 1..20: note = chemically synthesized
  source 1..20: mol_type = other DNA
taagtaggctgaggcactag

SEQ ID NO: 51408 - DNA, 20 bp, synthetic construct
  misc_feature 1..20: note = chemically synthesized
  source 1..20: mol_type = other DNA
atccttcctattctagtagt

SEQ ID NO: 51409 - DNA, 20 bp, synthetic construct
  misc_feature 1..20: note = chemically synthesized
  source 1..20: mol_type = other DNA
gacaggtggatcacaaggtc

SEQ ID NO: 51410 - DNA, 20 bp, synthetic construct
  misc_feature 1..20: note = chemically synthesized
  source 1..20: mol_type = other DNA
caagatggttaggaggctcc

SEQ ID NO: 51411 - DNA, 20 bp, synthetic construct
  misc_feature 1..20: note = chemically synthesized
  source 1..20: mol_type = other DNA
atacatttgggacagatcta

SEQ ID NO: 51412 - DNA, 20 bp, synthetic construct
  misc_feature 1..20: note = chemically synthesized
  source 1..20: mol_type = other DNA
acacttagactggggtcttc

SEQ ID NO: 51413 - DNA, 20 bp, synthetic construct
  misc_feature 1..20: note = chemically synthesized
  source 1..20: mol_type = other DNA
aaatgcccagcacagagctc

SEQ ID NO: 51414 - DNA, 20 bp, synthetic construct
  misc_feature 1..20: note = chemically synthesized
  source 1..20: mol_type = other DNA
ctcttccattcagaaactca

SEQ ID NO: 51415 - DNA, 20 bp, synthetic construct
  misc_feature 1..20: note = chemically synthesized
  source 1..20: mol_type = other DNA
tcattctcaatcacagggag

SEQ ID NO: 51416 - DNA, 20 bp, synthetic construct
  misc_feature 1..20: note = chemically synthesized
  source 1..20: mol_type = other DNA
aaagccagccccaaaggtac

SEQ ID NO: 51417 - DNA, 20 bp, synthetic construct
  misc_feature 1..20: note = chemically synthesized
  source 1..20: mol_type = other DNA
aagagtctatgttccaaaaa

SEQ ID NO: 51418 - DNA, 20 bp, synthetic construct
  misc_feature 1..20: note = chemically synthesized
  source 1..20: mol_type = other DNA
aaaaacctggatttaacaat

SEQ ID NO: 51419 - DNA, 20 bp, synthetic construct
  misc_feature 1..20: note = chemically synthesized
  source 1..20: mol_type = other DNA
taacaatctgagctttgtca

SEQ ID NO: 51420 - DNA, 20 bp, synthetic construct
  misc_feature 1..20: note = chemically synthesized
  source 1..20: mol_type = other DNA
catggtgctttgcggttggt

SEQ ID NO: 51421 - DNA, 20 bp, synthetic construct
  misc_feature 1..20: note = chemically synthesized
  source 1..20: mol_type = other DNA
tgttgtttctttaccttttt

SEQ ID NO: 51422 - DNA, 20 bp, synthetic construct
  misc_feature 1..20: note = chemically synthesized
  source 1..20: mol_type = other DNA
gcttttaaaaccataaagaa

SEQ ID NO: 51423 - DNA, 20 bp, synthetic construct
  misc_feature 1..20: note = chemically synthesized
  source 1..20: mol_type = other DNA
agtctgagaaatgcaattgc

SEQ ID NO: 51424 - DNA, 20 bp, synthetic construct
  misc_feature 1..20: note = chemically synthesized
  source 1..20: mol_type = other DNA
tttatattttcagacttttt

SEQ ID NO: 51425 - DNA, 20 bp, synthetic construct
  misc_feature 1..20: note = chemically synthesized
  source 1..20: mol_type = other DNA
tcatatcacaaaatttcaca

SEQ ID NO: 51426 - DNA, 20 bp, synthetic construct
  misc_feature 1..20: note = chemically synthesized
  source 1..20: mol_type = other DNA
ttttcactcaacattacata

SEQ ID NO: 51427 - DNA, 20 bp, synthetic construct
  misc_feature 1..20: note = chemically synthesized
  source 1..20: mol_type = other DNA
ctaatattttaaaggagagc

SEQ ID NO: 51428 - DNA, 20 bp, synthetic construct
  misc_feature 1..20: note = chemically synthesized
  source 1..20: mol_type = other DNA
gagctactgattaatgagca

SEQ ID NO: 51429 - DNA, 20 bp, synthetic construct
  misc_feature 1..20: note = chemically synthesized
  source 1..20: mol_type = other DNA
aagcattatcctttccaggc

SEQ ID NO: 51430 - DNA, 20 bp, synthetic construct
  misc_feature 1..20: note = chemically synthesized
  source 1..20: mol_type = other DNA
ggtctgcggagtcactgccc

SEQ ID NO: 51431 - DNA, 20 bp, synthetic construct
  misc_feature 1..20: note = chemically synthesized
  source 1..20: mol_type = other DNA
cccgtgcgcgttggcccccc

SEQ ID NO: 51432 - DNA, 20 bp, synthetic construct
  misc_feature 1..20: note = chemically synthesized
  source 1..20: mol_type = other DNA
aatctaacaggttgaaattg

SEQ ID NO: 51433 - DNA, 20 bp, synthetic construct
  misc_feature 1..20: note = chemically synthesized
  source 1..20: mol_type = other DNA
tctttgacaatttgggagag

SEQ ID NO: 51434 - DNA, 20 bp, synthetic construct
  misc_feature 1..20: note = chemically synthesized
  source 1..20: mol_type = other DNA
gagagtgaagattctcctgg

SEQ ID NO: 51435 - DNA, 20 bp, synthetic construct
  misc_feature 1..20: note = chemically synthesized
  source 1..20: mol_type = other DNA
gtgtttattcttttgtgaaa

SEQ ID NO: 51436 - DNA, 20 bp, synthetic construct
  misc_feature 1..20: note = chemically synthesized
  source 1..20: mol_type = other DNA
tgcaaaattgccagaggaaa

SEQ ID NO: 51437 - DNA, 20 bp, synthetic construct
  misc_feature 1..20: note = chemically synthesized
  source 1..20: mol_type = other DNA
ttccagatggacacacccag

SEQ ID NO: 51438 - DNA, 20 bp, synthetic construct
  misc_feature 1..20: note = chemically synthesized
  source 1..20: mol_type = other DNA
ttcagtgttctcacaaataa

SEQ ID NO: 51439 - DNA, 20 bp, synthetic construct
  misc_feature 1..20: note = chemically synthesized
  source 1..20: mol_type = other DNA
cagttttctaattttgcaag

SEQ ID NO: 51440 - DNA, 20 bp, synthetic construct
  misc_feature 1..20: note = chemically synthesized
  source 1..20: mol_type = other DNA
cattagaattttgcaaaaat

SEQ ID NO: 51441 - DNA, 20 bp, synthetic construct
  misc_feature 1..20: note = chemically synthesized
  source 1..20: mol_type = other DNA
gttgacatgagcagcatgga

SEQ ID NO: 51442 - DNA, 20 bp, synthetic construct
  misc_feature 1..20: note = chemically synthesized
  source 1..20: mol_type = other DNA
tctgggcagagctgcatgat

SEQ ID NO: 51443 - DNA, 20 bp, synthetic construct
  misc_feature 1..20: note = chemically synthesized
  source 1..20: mol_type = other DNA
caggtaggccacaggtgaca

SEQ ID NO: 51444 - DNA, 20 bp, synthetic construct
  misc_feature 1..20: note = chemically synthesized
  source 1..20: mol_type = other DNA
gtccagcggcaggatcagtc

SEQ ID NO: 51445 - DNA, 20 bp, synthetic construct
  misc_feature 1..20: note = chemically synthesized
  source 1..20: mol_type = other DNA
aattgatgaacaggcctgag

SEQ ID NO: 51446 - DNA, 20 bp, synthetic construct
  misc_feature 1..20: note = chemically synthesized
  source 1..20: mol_type = other DNA
gctaatggtggtggtaatga

SEQ ID NO: 51447 - DNA, 20 bp, synthetic construct
  misc_feature 1..20: note = chemically synthesized
  source 1..20: mol_type = other DNA
tcatcagtagacatcatata

SEQ ID NO: 51448 - DNA, 20 bp, synthetic construct
  misc_feature 1..20: note = chemically synthesized
  source 1..20: mol_type = other DNA
tagctggcccagagcctact

SEQ ID NO: 51449 - DNA, 20 bp, synthetic construct
  misc_feature 1..20: note = chemically synthesized
  source 1..20: mol_type = other DNA
tttctaaccaccatccccca

SEQ ID NO: 51450 - DNA, 20 bp, synthetic construct
  misc_feature 1..20: note = chemically synthesized
  source 1..20: mol_type = other DNA
cacctgcaggtccactgaga

SEQ ID NO: 51451 - DNA, 20 bp, synthetic construct
  misc_feature 1..20: note = chemically synthesized
  source 1..20: mol_type = other DNA
tcagcctctgagagggaggt

SEQ ID NO: 51452 - DNA, 20 bp, synthetic construct
  misc_feature 1..20: note = chemically synthesized
  source 1..20: mol_type = other DNA
aagttttcctgctctcccct

SEQ ID NO: 51453 - DNA, 20 bp, synthetic construct
  misc_feature 1..20: note = chemically synthesized
  source 1..20: mol_type = other DNA
tccctgacttggatcaaatg

SEQ ID NO: 51454 - DNA, 20 bp, synthetic construct
  misc_feature 1..20: note = chemically synthesized
  source 1..20: mol_type = other DNA
gtttggaggtgttgaggcca

SEQ ID NO: 51455 - DNA, 20 bp, synthetic construct
  misc_feature 1..20: note = chemically synthesized
  source 1..20: mol_type = other DNA
ctccccaaggccccatcagg

SEQ ID NO: 51456 - DNA, 20 bp, synthetic construct
  misc_feature 1..20: note = chemically synthesized
  source 1..20: mol_type = other DNA
aactttcctggcaacttgcg

SEQ ID NO: 51457 - DNA, 20 bp, synthetic construct
  misc_feature 1..20: note = chemically synthesized
  source 1..20: mol_type = other DNA
gtaggttttcaccattatca

SEQ ID NO: 51458 - DNA, 20 bp, synthetic construct
  misc_feature 1..20: note = chemically synthesized
  source 1..20: mol_type = other DNA
gatgtttgccttgctcaaat

SEQ ID NO: 51459 - DNA, 20 bp, synthetic construct
  misc_feature 1..20: note = chemically synthesized
  source 1..20: mol_type = other DNA
caggtgatgcaccctctgcc

SEQ ID NO: 51460 - DNA, 20 bp, synthetic construct
  misc_feature 1..20: note = chemically synthesized
  source 1..20: mol_type = other DNA
acttccatcatgcagctctg

SEQ ID NO: 51461 - DNA, 20 bp, synthetic construct
  misc_feature 1..20: note = chemically synthesized
  source 1..20: mol_type = other DNA
catgtcaactccagatgcag

SEQ ID NO: 51462 - DNA, 20 bp, synthetic construct
  misc_feature 1..20: note = chemically synthesized
  source 1..20: mol_type = other DNA
cctgtgccatgctcgcaaag

SEQ ID NO: 51463 - DNA, 20 bp, synthetic construct
  misc_feature 1..20: note = chemically synthesized
  source 1..20: mol_type = other DNA
ttgcaaaattctaatgaaag

SEQ ID NO: 51464 - DNA, 20 bp, synthetic construct
  misc_feature 1..20: note = chemically synthesized
  source 1..20: mol_type = other DNA
tgggcttgcaaaattagaaa

SEQ ID NO: 51465 - DNA, 20 bp, synthetic construct
  misc_feature 1..20: note = chemically synthesized
  source 1..20: mol_type = other DNA
gaatttggcaaagaaaataa

SEQ ID NO: 51466 - DNA, 20 bp, synthetic construct
  misc_feature 1..20: note = chemically synthesized
  source 1..20: mol_type = other DNA
aatcaggacaatttcaacct

SEQ ID NO: 51467 - DNA, 20 bp, synthetic construct
  misc_feature 1..20: note = chemically synthesized
  source 1..20: mol_type = other DNA
acactcatacaagtgtggtg

SEQ ID NO: 51468 - DNA, 20 bp, synthetic construct
  misc_feature 1..20: note = chemically synthesized
  source 1..20: mol_type = other DNA
tcatacaagtgtggtgaagt

SEQ ID NO: 51469 - DNA, 20 bp, synthetic construct
  misc_feature 1..20: note = chemically synthesized
  source 1..20: mol_type = other DNA
actagacaacctccttacac

SEQ ID NO: 51470 - DNA, 20 bp, synthetic construct
  misc_feature 1..20: note = chemically synthesized
  source 1..20: mol_type = other DNA
agagcaggagtgatggaact

SEQ ID NO: 51471 - DNA, 20 bp, synthetic construct
  misc_feature 1..20: note = chemically synthesized
  source 1..20: mol_type = other DNA
gaagtgagatacaccacatt

SEQ ID NO: 51472 - DNA, 20 bp, synthetic construct
  misc_feature 1..20: note = chemically synthesized
  source 1..20: mol_type = other DNA
aagcttgtgcctggaaagga

SEQ ID NO: 51473 - DNA, 20 bp, synthetic construct
  misc_feature 1..20: note = chemically synthesized
  source 1..20: mol_type = other DNA
tacatttaaacattattctt

SEQ ID NO: 51474 - DNA, 20 bp, synthetic construct
  misc_feature 1..20: note = chemically synthesized
  source 1..20: mol_type = other DNA
cgcaaagcaccatgacaaag

SEQ ID NO: 51475 - DNA, 20 bp, synthetic construct
  misc_feature 1..20: note = chemically synthesized
  source 1..20: mol_type = other DNA
caaagctcagattgttaaat

SEQ ID NO: 51476 - DNA, 20 bp, synthetic construct
  misc_feature 1..20: note = chemically synthesized
  source 1..20: mol_type = other DNA
ttggaacatagactcttata

SEQ ID NO: 51477 - DNA, 20 bp, synthetic construct
  misc_feature 1..20: note = chemically synthesized
  source 1..20: mol_type = other DNA
tcaccactgctctgttcttc

SEQ ID NO: 51478 - DNA, 20 bp, synthetic construct
  misc_feature 1..20: note = chemically synthesized
  source 1..20: mol_type = other DNA
taaacacaggtacctttggg

SEQ ID NO: 51479 - DNA, 20 bp, synthetic construct
  misc_feature 1..20: note = chemically synthesized
  source 1..20: mol_type = other DNA
tctcaaggaagcccagctcc

SEQ ID NO: 51480 - DNA, 20 bp, synthetic construct
  misc_feature 1..20: note = chemically synthesized
  source 1..20: mol_type = other DNA
gaatgaagtgtgcaatcgct

SEQ ID NO: 51481 - DNA, 20 bp, synthetic construct
  misc_feature 1..20: note = chemically synthesized
  source 1..20: mol_type = other DNA
tcccaaagtagcgaattcaa

SEQ ID NO: 51482 - DNA, 20 bp, synthetic construct
  misc_feature 1..20: note = chemically synthesized
  source 1..20: mol_type = other DNA
gatcatccaaggggacttct

SEQ ID NO: 51483 - DNA, 20 bp, synthetic construct
  misc_feature 1..20: note = chemically synthesized
  source 1..20: mol_type = other DNA
ccggtggccagggactaaag

SEQ ID NO: 51484 - DNA, 20 bp, synthetic construct
  misc_feature 1..20: note = chemically synthesized
  source 1..20: mol_type = other DNA
cagagttggcgtgtctcccc

SEQ ID NO: 51485 - DNA, 20 bp, synthetic construct
  misc_feature 1..20: note = chemically synthesized
  source 1..20: mol_type = other DNA
ctccccaattgatttacaac

SEQ ID NO: 51486 - DNA, 20 bp, synthetic construct
  misc_feature 1..20: note = chemically synthesized
  source 1..20: mol_type = other DNA
atttacaactggggcttgga

SEQ ID NO: 51487 - DNA, 20 bp, synthetic construct
  misc_feature 1..20: note = chemically synthesized
  source 1..20: mol_type = other DNA
tttccacttaattctaccac

SEQ ID NO: 51488 - DNA, 20 bp, synthetic construct
  misc_feature 1..20: note = chemically synthesized
  source 1..20: mol_type = other DNA
tacttcatgagaacgaaaat

SEQ ID NO: 51489 - DNA, 20 bp, synthetic construct
  misc_feature 1..20: note = chemically synthesized
  source 1..20: mol_type = other DNA
gcaccatgaattcatttgcg

SEQ ID NO: 51490 - DNA, 20 bp, synthetic construct
  misc_feature 1..20: note = chemically synthesized
  source 1..20: mol_type = other DNA
catttgcggaaagattgata

SEQ ID NO: 51491 - DNA, 20 bp, synthetic construct
  misc_feature 1..20: note = chemically synthesized
  source 1..20: mol_type = other DNA
accccggttgaagtgcactg

SEQ ID NO: 51492 - DNA, 20 bp, synthetic construct
  misc_feature 1..20: note = chemically synthesized
  source 1..20: mol_type = other DNA
tactccagcctccctagtag

SEQ ID NO: 51493 - DNA, 20 bp, synthetic construct
  misc_feature 1..20: note = chemically synthesized
  source 1..20: mol_type = other DNA
ttttgtatttttagtagaga

SEQ ID NO: 51494 - DNA, 20 bp, synthetic construct
  misc_feature 1..20: note = chemically synthesized
  source 1..20: mol_type = other DNA
tgtcttggcctcccaaagtg

SEQ ID NO: 51495 - DNA, 20 bp, synthetic construct
  misc_feature 1..20: note = chemically synthesized
  source 1..20: mol_type = other DNA
ttgagccaccgcactcgacc

SEQ ID NO: 51496 - DNA, 20 bp, synthetic construct
  misc_feature 1..20: note = chemically synthesized
  source 1..20: mol_type = other DNA
agccacaactactagaatag

SEQ ID NO: 51497 - DNA, 20 bp, synthetic construct
  misc_feature 1..20: note = chemically synthesized
  source 1..20: mol_type = other DNA
ttttgtattttttgtagaga

SEQ ID NO: 51498 - DNA, 20 bp, synthetic construct
  misc_feature 1..20: note = chemically synthesized
  source 1..20: mol_type = other DNA
acagggttttggcatgttgc

SEQ ID NO: 51499 - DNA, 20 bp, synthetic construct
  misc_feature 1..20: note = chemically synthesized
  source 1..20: mol_type = other DNA
tgccgtggcctcccaaaatg

SEQ ID NO: 51500 - DNA, 20 bp, synthetic construct
  misc_feature 1..20: note = chemically synthesized
  source 1..20: mol_type = other DNA
tgagccaccaccccctcctg

SEQ ID NO: 51501 - DNA, 20 bp, synthetic construct
  misc_feature 1..20: note = chemically synthesized
  source 1..20: mol_type = other DNA
aaataaattttgaagataat

SEQ ID NO: 51502 - DNA, 20 bp, synthetic construct
  misc_feature 1..20: note = chemically synthesized
  source 1..20: mol_type = other DNA
cacttatgttgtcatttcgg

SEQ ID NO: 51503 - DNA, 20 bp, synthetic construct
  misc_feature 1..20: note = chemically synthesized
  source 1..20: mol_type = other DNA
tggagatgttaacatttata

SEQ ID NO: 51504 - DNA, 20 bp, synthetic construct
  misc_feature 1..20: note = chemically synthesized
  source 1..20: mol_type = other DNA
tcgtacagcactgcctgttg

SEQ ID NO: 51505 - DNA, 20 bp, synthetic construct
  misc_feature 1..20: note = chemically synthesized
  source 1..20: mol_type = other DNA
ccagcaaatatgagctactt

SEQ ID NO: 51506 - DNA, 20 bp, synthetic construct
  misc_feature 1..20: note = chemically synthesized
  source 1..20: mol_type = other DNA
gtggagcagctgagggggga

SEQ ID NO: 51507 - DNA, 20 bp, synthetic construct
  misc_feature 1..20: note = chemically synthesized
  source 1..20: mol_type = other DNA
ataagactctatattcaagg

SEQ ID NO: 51508 - DNA, 20 bp, synthetic construct
  misc_feature 1..20: note = chemically synthesized
  source 1..20: mol_type = other DNA
tcattaacttaatttgacta

SEQ ID NO: 51509 - DNA, 20 bp, synthetic construct
  misc_feature 1..20: note = chemically synthesized
  source 1..20: mol_type = other DNA
tttgactatctggtttgtgg

SEQ ID NO: 51510 - DNA, 20 bp, synthetic construct
  misc_feature 1..20: note = chemically synthesized
  source 1..20: mol_type = other DNA
tcatgtaagtcaacaatgtc

SEQ ID NO: 51511 - DNA, 20 bp, synthetic construct
  misc_feature 1..20: note = chemically synthesized
  source 1..20: mol_type = other DNA
atttctgaaatcaggtaaga

SEQ ID NO: 51512 - DNA, 20 bp, synthetic construct
  misc_feature 1..20: note = chemically synthesized
  source 1..20: mol_type = other DNA
tgtagtaaaaatacatatgc

SEQ ID NO: 51513 - DNA, 20 bp, synthetic construct
  misc_feature 1..20: note = chemically synthesized
  source 1..20: mol_type = other DNA
ttatgtgcaattcatttaat

SEQ ID NO: 51514 - DNA, 20 bp, synthetic construct
  misc_feature 1..20: note = chemically synthesized
  source 1..20: mol_type = other DNA
ttcccagttcaaaatcttgt

SEQ ID NO: 51515 - DNA, 20 bp, synthetic construct
  misc_feature 1..20: note = chemically synthesized
  source 1..20: mol_type = other DNA
attgaaaaattcttaaaaaa

SEQ ID NO: 51516 - DNA, 20 bp, synthetic construct
  misc_feature 1..20: note = chemically synthesized
  source 1..20: mol_type = other DNA
gaatgggcagaaaaaataat

SEQ ID NO: 51517 - DNA, 20 bp, synthetic construct
  misc_feature 1..20: note = chemically synthesized
  source 1..20: mol_type = other DNA
atgcaaaggatggctaagct

SEQ ID NO: 51518 - DNA, 20 bp, synthetic construct
  misc_feature 1..20: note = chemically synthesized
  source 1..20: mol_type = other DNA
gctaagctcttcgcttggtt

SEQ ID NO: 51519 - DNA, 20 bp, synthetic construct
  misc_feature 1..20: note = chemically synthesized
  source 1..20: mol_type = other DNA
acaatgaaataactctttga

SEQ ID NO: 51520 - DNA, 20 bp, synthetic construct
  misc_feature 1..20: note = chemically synthesized
  source 1..20: mol_type = other DNA
tctctttgttatggcctgag

SEQ ID NO: 51521 - DNA, 20 bp, synthetic construct
  misc_feature 1..20: note = chemically synthesized
  source 1..20: mol_type = other DNA
aaggctttccatcggtatac

SEQ ID NO: 51522 - DNA, 20 bp, synthetic construct
  misc_feature 1..20: note = chemically synthesized
  source 1..20: mol_type = other DNA
tgccagatgatatacgcata

SEQ ID NO: 51523 - DNA, 20 bp, synthetic construct
  misc_feature 1..20: note = chemically synthesized
  source 1..20: mol_type = other DNA
catacacacatacacaccgt

SEQ ID NO: 51524 - DNA, 20 bp, synthetic construct
  misc_feature 1..20: note = chemically synthesized
  source 1..20: mol_type = other DNA
agtgtgtgtcctttacaaat

SEQ ID NO: 51525 - DNA, 20 bp, synthetic construct
  misc_feature 1..20: note = chemically synthesized
  source 1..20: mol_type = other DNA
aaatcaaggaaataaagaaa

SEQ ID NO: 51526 - DNA, 20 bp, synthetic construct
  misc_feature 1..20: note = chemically synthesized
  source 1..20: mol_type = other DNA
ataaagaaacctggatttaa

SEQ ID NO: 51527 - DNA, 20 bp, synthetic construct
  misc_feature 1..20: note = chemically synthesized
  source 1..20: mol_type = other DNA
atgtaactgaagagcaggtt

SEQ ID NO: 51528 - DNA, 20 bp, synthetic construct
  misc_feature 1..20: note = chemically synthesized
  source 1..20: mol_type = other DNA
agagaagtctggtataaaga

SEQ ID NO: 51529 - DNA, 20 bp, synthetic construct
  misc_feature 1..20: note = chemically synthesized
  source 1..20: mol_type = other DNA
agtctggtataaagaaagtg

SEQ ID NO: 51530 - DNA, 20 bp, synthetic construct
  misc_feature 1..20: note = chemically synthesized
  source 1..20: mol_type = other DNA
gaaagtgatttgcttccaaa

SEQ ID NO: 51531 - DNA, 20 bp, synthetic construct
  misc_feature 1..20: note = chemically synthesized
  source 1..20: mol_type = other DNA
aaggcaacagaggaggcgag

SEQ ID NO: 51532 - DNA, 20 bp, synthetic construct
  misc_feature 1..20: note = chemically synthesized
  source 1..20: mol_type = other DNA
gcaaggattcaggggtccat

SEQ ID NO: 51533 - DNA, 20 bp, synthetic construct
  misc_feature 1..20: note = chemically synthesized
  source 1..20: mol_type = other DNA
gaggcaaatctctggagggt

SEQ ID NO: 51534 - DNA, 20 bp, synthetic construct
  misc_feature 1..20: note = chemically synthesized
  source 1..20: mol_type = other DNA
gggtgagagttttgtagtgg

SEQ ID NO: 51535 - DNA, 20 bp, synthetic construct
  misc_feature 1..20: note = chemically synthesized
  source 1..20: mol_type = other DNA
gagttttgtagtgggcatgc

SEQ ID NO: 51536 - DNA, 20 bp, synthetic construct
  misc_feature 1..20: note = chemically synthesized
  source 1..20: mol_type = other DNA
gagtctgatgaaagggaggt

SEQ ID NO: 51537 - DNA, 20 bp, synthetic construct
  misc_feature 1..20: note = chemically synthesized
  source 1..20: mol_type = other DNA
caaagaaaatacagagcagg

SEQ ID NO: 51538 - DNA, 20 bp, synthetic construct
  misc_feature 1..20: note = chemically synthesized
  source 1..20: mol_type = other DNA
gagcaggagaagattaagca

SEQ ID NO: 51539 - DNA, 20 bp, synthetic construct
  misc_feature 1..20: note = chemically synthesized
  source 1..20: mol_type = other DNA
ctagaacaaacttctctgcc

SEQ ID NO: 51540 - DNA, 20 bp, synthetic construct
  misc_feature 1..20: note = chemically synthesized
  source 1..20: mol_type = other DNA
ttctctgccacaggattaac

SEQ ID NO: 51541 - DNA, 20 bp, synthetic construct
  misc_feature 1..20: note = chemically synthesized
  source 1..20: mol_type = other DNA
tgataagctcttttggaaag

SEQ ID NO: 51542 - DNA, 20 bp, synthetic construct
  misc_feature 1..20: note = chemically synthesized
  source 1..20: mol_type = other DNA
tggaatgcccggggagagga

SEQ ID NO: 51543 - DNA, 20 bp, synthetic construct
  misc_feature 1..20: note = chemically synthesized
  source 1..20: mol_type = other DNA
ataaaagtatttttcctatt

SEQ ID NO: 51544 - DNA, 20 bp, synthetic construct
  misc_feature 1..20: note = chemically synthesized
  source 1..20: mol_type = other DNA
agtatttttcctattaaaag

SEQ ID NO: 51545 - DNA, 20 bp, synthetic construct
  misc_feature 1..20: note = chemically synthesized
  source 1..20: mol_type = other DNA
ttcctattaaaagatttgtt

SEQ ID NO: 51546 - DNA, 20 bp, synthetic construct
  misc_feature 1..20: note = chemically synthesized
  source 1..20: mol_type = other DNA
ggaggtgaatcagagaaaca

SEQ ID NO: 51547 - DNA, 20 bp, synthetic construct
  misc_feature 1..20: note = chemically synthesized
  source 1..20: mol_type = other DNA
catcaggttaaaaaaagaaa

SEQ ID NO: 51548 - DNA, 20 bp, synthetic construct
  misc_feature 1..20: note = chemically synthesized
  source 1..20: mol_type = other DNA
gttaaaaaaagaaaaattga

SEQ ID NO: 51549 - DNA, 20 bp, synthetic construct
  misc_feature 1..20: note = chemically synthesized
  source 1..20: mol_type = other DNA
agttaaagggggaaataaat

SEQ ID NO: 51550 - DNA, 20 bp, synthetic construct
  misc_feature 1..20: note = chemically synthesized
  source 1..20: mol_type = other DNA
catttcaaaaacactcttca

SEQ ID NO: 51551 - DNA, 20 bp, synthetic construct
  misc_feature 1..20: note = chemically synthesized
  source 1..20: mol_type = other DNA
aagcaccttattaatttatt

SEQ ID NO: 51552 - DNA, 20 bp, synthetic construct
  misc_feature 1..20: note = chemically synthesized
  source 1..20: mol_type = other DNA
gatattttgatatatctatc

SEQ ID NO: 51553 - DNA, 20 bp, synthetic construct
  misc_feature 1..20: note = chemically synthesized
  source 1..20: mol_type = other DNA
atatctatcaagtgcttttt

SEQ ID NO: 51554 - DNA, 20 bp, synthetic construct
  misc_feature 1..20: note = chemically synthesized
  source 1..20: mol_type = other DNA
agccaatgcctgttcaataa

SEQ ID NO: 51555 - DNA, 20 bp, synthetic construct
  misc_feature 1..20: note = chemically synthesized
  source 1..20: mol_type = other DNA
cctgtattccctagaagtct

SEQ ID NO: 51556 - DNA, 20 bp, synthetic construct
  misc_feature 1..20: note = chemically synthesized
  source 1..20: mol_type = other DNA
aagtctcgctgctttcagag

SEQ ID NO: 51557 - DNA, 20 bp, synthetic construct
  misc_feature 1..20: note = chemically synthesized
  source 1..20: mol_type = other DNA
caaagtggtcaaggttgtcc

SEQ ID NO: 51558 - DNA, 20 bp, synthetic construct
  misc_feature 1..20: note = chemically synthesized
  source 1..20: mol_type = other DNA
gtcctgttgcttaattccat

SEQ ID NO: 51559 - DNA, 20 bp, synthetic construct
  misc_feature 1..20: note = chemically synthesized
  source 1..20: mol_type = other DNA
cagagatggagctggcatct

SEQ ID NO: 51560 - DNA, 20 bp, synthetic construct
  misc_feature 1..20: note = chemically synthesized
  source 1..20: mol_type = other DNA
tttgccacaaccaggcagaa

SEQ ID NO: 51561 - DNA, 20 bp, synthetic construct
  misc_feature 1..20: note = chemically synthesized
  source 1..20: mol_type = other DNA
caggcagaaagcagcttttg

SEQ ID NO: 51562 - DNA, 20 bp, synthetic construct
  misc_feature 1..20: note = chemically synthesized
  source 1..20: mol_type = other DNA
cttttgaacagatttgttgc

SEQ ID NO: 51563 - DNA, 20 bp, synthetic construct
  misc_feature 1..20: note = chemically synthesized
  source 1..20: mol_type = other DNA
tgggcagtattggtcccagg

SEQ ID NO: 51564 - DNA, 20 bp, synthetic construct
  misc_feature 1..20: note = chemically synthesized
  source 1..20: mol_type = other DNA
aaaaatggccttctttgtgg

SEQ ID NO: 51565 - DNA, 20 bp, synthetic construct
  misc_feature 1..20: note = chemically synthesized
  source 1..20: mol_type = other DNA
cttcatatcctccatttttt

SEQ ID NO: 51566 - DNA, 20 bp, synthetic construct
  misc_feature 1..20: note = chemically synthesized
  source 1..20: mol_type = other DNA
taaaggagggaccattcaga

SEQ ID NO: 51567 - DNA, 20 bp, synthetic construct
  misc_feature 1..20: note = chemically synthesized
  source 1..20: mol_type = other DNA
ctccaaggttcatttctaca

SEQ ID NO: 51568 - DNA, 20 bp, synthetic construct
  misc_feature 1..20: note = chemically synthesized
  source 1..20: mol_type = other DNA
gacatggcaatcaagagcaa

SEQ ID NO: 51569 - DNA, 20 bp, synthetic construct
  misc_feature 1..20: note = chemically synthesized
  source 1..20: mol_type = other DNA
caaacatgatttattcttat

SEQ ID NO: 51570 - DNA, 20 bp, synthetic construct
  misc_feature 1..20: note = chemically synthesized
  source 1..20: mol_type = other DNA
gtctggagaatctgaaaccc

SEQ ID NO: 51571 - DNA, 20 bp, synthetic construct
  misc_feature 1..20: note = chemically synthesized
  source 1..20: mol_type = other DNA
tgtacttcttgtattcttaa

SEQ ID NO: 51572 - DNA, 20 bp, synthetic construct
  misc_feature 1..20: note = chemically synthesized
  source 1..20: mol_type = other DNA
atcactgcaaacctctataa

SEQ ID NO: 51573 - DNA, 20 bp, synthetic construct
  misc_feature 1..20: note = chemically synthesized
  source 1..20: mol_type = other DNA
ctacgcattgacttatcttc

SEQ ID NO: 51574 - DNA, 20 bp, synthetic construct
  misc_feature 1..20: note = chemically synthesized
  source 1..20: mol_type = other DNA
cgttgtactttcttccttac

SEQ ID NO: 51575 - DNA, 20 bp, synthetic construct
  misc_feature 1..20: note = chemically synthesized
  source 1..20: mol_type = other DNA
ccactgtttatctcaaactc

SEQ ID NO: 51576 - DNA, 20 bp, synthetic construct
  misc_feature 1..20: note = chemically synthesized
  source 1..20: mol_type = other DNA
tatgggctcaggagggagcg

SEQ ID NO: 51577 - DNA, 20 bp, synthetic construct
  misc_feature 1..20: note = chemically synthesized
  source 1..20: mol_type = other DNA
gccttatggaaaagtggcca

SEQ ID NO: 51578 - DNA, 20 bp, synthetic construct
  misc_feature 1..20: note = chemically synthesized
  source 1..20: mol_type = other DNA
cattttagtcagtgttggct

SEQ ID NO: 51579 - DNA, 20 bp, synthetic construct
  misc_feature 1..20: note = chemically synthesized
  source 1..20: mol_type = other DNA
cagtaccaccgttaatgccc

SEQ ID NO: 51580 - DNA, 20 bp, synthetic construct
  misc_feature 1..20: note = chemically synthesized
  source 1..20: mol_type = other DNA
gcacacagcagggaaagaat

SEQ ID NO: 51581 - DNA, 20 bp, synthetic construct
  misc_feature 1..20: note = chemically synthesized
  source 1..20: mol_type = other DNA
aattccagtttctctttctt

SEQ ID NO: 51582 - DNA, 20 bp, synthetic construct
  misc_feature 1..20: note = chemically synthesized
  source 1..20: mol_type = other DNA
actcttcaccaggcaaggct

SEQ ID NO: 51583 - DNA, 20 bp, synthetic construct
  misc_feature 1..20: note = chemically synthesized
  source 1..20: mol_type = other DNA
acatttccactggctgcact

SEQ ID NO: 51584 - DNA, 20 bp, synthetic construct
  misc_feature 1..20: note = chemically synthesized
  source 1..20: mol_type = other DNA
agggaaggaaaaaagatcct

SEQ ID NO: 51585 - DNA, 20 bp, synthetic construct
  misc_feature 1..20: note = chemically synthesized
  source 1..20: mol_type = other DNA
gaaaaatgtaaaaaggctag

SEQ ID NO: 51586 - DNA, 20 bp, synthetic construct
  misc_feature 1..20: note = chemically synthesized
  source 1..20: mol_type = other DNA
ttggactgtcttccttgctc

SEQ ID NO: 51587 - DNA, 20 bp, synthetic construct
  misc_feature 1..20: note = chemically synthesized
  source 1..20: mol_type = other DNA
ctctagagaaccccgactaa

SEQ ID NO: 51588 - DNA, 20 bp, synthetic construct
  misc_feature 1..20: note = chemically synthesized
  source 1..20: mol_type = other DNA
attaaggatggaattctttc

SEQ ID NO: 51589 - DNA, 20 bp, synthetic construct
  misc_feature 1..20: note = chemically synthesized
  source 1..20: mol_type = other DNA
gttttgggacttctggtgtt

SEQ ID NO: 51590 - DNA, 20 bp, synthetic construct
  misc_feature 1..20: note = chemically synthesized
  source 1..20: mol_type = other DNA
cttctggtgttggctgatta

SEQ ID NO: 51591 - DNA, 20 bp, synthetic construct
  misc_feature 1..20: note = chemically synthesized
  source 1..20: mol_type = other DNA
cactgatagtacttggcctg

SEQ ID NO: 51592 - DNA, 20 bp, synthetic construct
  misc_feature 1..20: note = chemically synthesized
  source 1..20: mol_type = other DNA
aaaataaatgcatttgacac

SEQ ID NO: 51593 - DNA, 20 bp, synthetic construct
  misc_feature 1..20: note = chemically synthesized
  source 1..20: mol_type = other DNA
ttcatcacttatgagaggca

SEQ ID NO: 51594 - DNA, 20 bp, synthetic construct
  misc_feature 1..20: note = chemically synthesized
  source 1..20: mol_type = other DNA
ccaaggaacataatgaagtt

SEQ ID NO: 51595 - DNA, 20 bp, synthetic construct
  misc_feature 1..20: note = chemically synthesized
  source 1..20: mol_type = other DNA
gatactgagccacaaatctg

SEQ ID NO: 51596 - DNA, 20 bp, synthetic construct
  misc_feature 1..20: note = chemically synthesized
  source 1..20: mol_type = other DNA
ctgctaagattgccctgaat

SEQ ID NO: 51597 - DNA, 20 bp, synthetic construct
  misc_feature 1..20: note = chemically synthesized
  source 1..20: mol_type = other DNA
ggtgcatgcacagccttgcc

SEQ ID NO: 51598 - DNA, 20 bp, synthetic construct
  misc_feature 1..20: note = chemically synthesized
  source 1..20: mol_type = other DNA
ccctgatgaagctgaggaca

SEQ ID NO: 51599 - DNA, 20 bp, synthetic construct
  misc_feature 1..20: note = chemically synthesized
  source 1..20: mol_type = other DNA
gaaacttttttgccagaaga

SEQ ID NO: 51600 - DNA, 20 bp, synthetic construct
  misc_feature 1..20: note = chemically synthesized
  source 1..20: mol_type = other DNA
gtctgaggatgtaaaccctg

SEQ ID NO: 51601 - DNA, 20 bp, synthetic construct
  misc_feature 1..20: note = chemically synthesized
  source 1..20: mol_type = other DNA
gcagctgccaggcaagataa

SEQ ID NO: 51602 - DNA, 20 bp, synthetic construct
  misc_feature 1..20: note = chemically synthesized
  source 1..20: mol_type = other DNA
gaggcacccctaatgcccct

SEQ ID NO: 51603 - DNA, 20 bp, synthetic construct
  misc_feature 1..20: note = chemically synthesized
  source 1..20: mol_type = other DNA
ggtgcattatactctaaaag

SEQ ID NO: 51604 - DNA, 20 bp, synthetic construct
  misc_feature 1..20: note = chemically synthesized
  source 1..20: mol_type = other DNA
ttatactctaaaagaactgc

SEQ ID NO: 51605 - DNA, 20 bp, synthetic construct
  misc_feature 1..20: note = chemically synthesized
  source 1..20: mol_type = other DNA
agttggatcaagctgaattt

SEQ ID NO: 51606 - DNA, 20 bp, synthetic construct
  misc_feature 1..20: note = chemically synthesized
  source 1..20: mol_type = other DNA
attggtttggccctactaag

SEQ ID NO: 51607 - DNA, 20 bp, synthetic construct
  misc_feature 1..20: note = chemically synthesized
  source 1..20: mol_type = other DNA
ggcgggcagatcacgagatc

SEQ ID NO: 51608 - DNA, 20 bp, synthetic construct
  misc_feature 1..20: note = chemically synthesized
  source 1..20: mol_type = other DNA
ttgggaggctgaggcaagag

SEQ ID NO: 51609 - DNA, 20 bp, synthetic construct
  misc_feature 1..20: note = chemically synthesized
  source 1..20: mol_type = other DNA
aactgcttgaacctgtgagg

SEQ ID NO: 51610 - DNA, 20 bp, synthetic construct
  misc_feature 1..20: note = chemically synthesized
  source 1..20: mol_type = other DNA
aaaaaaaaaaaaaaagttat

SEQ ID NO: 51611 - DNA, 20 bp, synthetic construct
  misc_feature 1..20: note = chemically synthesized
  source 1..20: mol_type = other DNA
aaaaaaagttataatagttt

SEQ ID NO: 51612 - DNA, 20 bp, synthetic construct
  misc_feature 1..20: note = chemically synthesized
  source 1..20: mol_type = other DNA
atttgcttggttagctgaaa

SEQ ID NO: 51613 - DNA, 20 bp, synthetic construct
  misc_feature 1..20: note = chemically synthesized
  source 1..20: mol_type = other DNA
tgttagtgagctggaaatgc

SEQ ID NO: 51614 - DNA, 20 bp, synthetic construct
  misc_feature 1..20: note = chemically synthesized
  source 1..20: mol_type = other DNA
taatgtagaggaagtgatcc

SEQ ID NO: 51615 - DNA, 20 bp, synthetic construct
  misc_feature 1..20: note = chemically synthesized
  source 1..20: mol_type = other DNA
ggaagtgatccaaaggctta

SEQ ID NO: 51616 - DNA, 20 bp, synthetic construct
  misc_feature 1..20: note = chemically synthesized
  source 1..20: mol_type = other DNA
tagggagattaggatggtgg

SEQ ID NO: 51617 - DNA, 20 bp, synthetic construct
  misc_feature 1..20: note = chemically synthesized
  source 1..20: mol_type = other DNA
ccagaagatacacccttggc

SEQ ID NO: 51618 - DNA, 20 bp, synthetic construct
  misc_feature 1..20: note = chemically synthesized
  source 1..20: mol_type = other DNA
ccttggccgaagctttgtga

SEQ ID NO: 51619 - DNA, 20 bp, synthetic construct
  misc_feature 1..20: note = chemically synthesized
  source 1..20: mol_type = other DNA
gggaaacctactgtattcct

SEQ ID NO: 51620 - DNA, 20 bp, synthetic construct
  misc_feature 1..20: note = chemically synthesized
  source 1..20: mol_type = other DNA
ggacactggctctgagctga

SEQ ID NO: 51621 - DNA, 20 bp, synthetic construct
  misc_feature 1..20: note = chemically synthesized
  source 1..20: mol_type = other DNA
tgtggttccccagttaaagt

SEQ ID NO: 51622 - DNA, 20 bp, synthetic construct
  misc_feature 1..20: note = chemically synthesized
  source 1..20: mol_type = other DNA
tatggaggttaggtaattaa

SEQ ID NO: 51623 - DNA, 20 bp, synthetic construct
  misc_feature 1..20: note = chemically synthesized
  source 1..20: mol_type = other DNA
tcccatccctggagggactg

SEQ ID NO: 51624 - DNA, 20 bp, synthetic construct
  misc_feature 1..20: note = chemically synthesized
  source 1..20: mol_type = other DNA
ggacttgaaagacgcagggg

SEQ ID NO: 51625 - DNA, 20 bp, synthetic construct
  misc_feature 1..20: note = chemically synthesized
  source 1..20: mol_type = other DNA
gatggatcttggaaaatgat

SEQ ID NO: 51626 - DNA, 20 bp, synthetic construct
  misc_feature 1..20: note = chemically synthesized
  source 1..20: mol_type = other DNA
gaaaatgatggtggattatt

SEQ ID NO: 51627 - DNA, 20 bp, synthetic construct
  misc_feature 1..20: note = chemically synthesized
  source 1..20: mol_type = other DNA
attgcagctgctctaccagt

SEQ ID NO: 51628 - DNA, 20 bp, synthetic construct
  misc_feature 1..20: note = chemically synthesized
  source 1..20: mol_type = other DNA
tgctctaccagttgtggttt

SEQ ID NO: 51629 - DNA, 20 bp, synthetic construct
  misc_feature 1..20: note = chemically synthesized
  source 1..20: mol_type = other DNA
ctggtgcctggtatgcagcc

SEQ ID NO: 51630 - DNA, 20 bp, synthetic construct
  misc_feature 1..20: note = chemically synthesized
  source 1..20: mol_type = other DNA
atgcagccattggcttggca

SEQ ID NO: 51631 - DNA, 20 bp, synthetic construct
  misc_feature 1..20: note = chemically synthesized
  source 1..20: mol_type = other DNA
cctcaggggtgtatcaactc

SEQ ID NO: 51632 - DNA, 20 bp, synthetic construct
  misc_feature 1..20: note = chemically synthesized
  source 1..20: mol_type = other DNA
atcttatttggagagacctt

SEQ ID NO: 51633 - DNA, 20 bp, synthetic construct
  misc_feature 1..20: note = chemically synthesized
  source 1..20: mol_type = other DNA
ccattacattcatgacatta

SEQ ID NO: 51634 - DNA, 20 bp, synthetic construct
  misc_feature 1..20: note = chemically synthesized
  source 1..20: mol_type = other DNA
ctaaggtgaagcataacttg

SEQ ID NO: 51635 - DNA, 20 bp, synthetic construct
  misc_feature 1..20: note = chemically synthesized
  source 1..20: mol_type = other DNA
cacaatgcctggtgggccta

SEQ ID NO: 51636 - DNA, 20 bp, synthetic construct
  misc_feature 1..20: note = chemically synthesized
  source 1..20: mol_type = other DNA
gattttggaggcaacacatt

SEQ ID NO: 51637 - DNA, 20 bp, synthetic construct
  misc_feature 1..20: note = chemically synthesized
  source 1..20: mol_type = other DNA
atcgagtgacctgaaaggct

SEQ ID NO: 51638 - DNA, 20 bp, synthetic construct
  misc_feature 1..20: note = chemically synthesized
  source 1..20: mol_type = other DNA
acatgaccccgcagatccaa

SEQ ID NO: 51639 - DNA, 20 bp, synthetic construct
  misc_feature 1..20: note = chemically synthesized
  source 1..20: mol_type = other DNA
gtgtcagtggcagataggga

SEQ ID NO: 51640 - DNA, 20 bp, synthetic construct
  misc_feature 1..20: note = chemically synthesized
  source 1..20: mol_type = other DNA
gtgaatcacagtggagacct

SEQ ID NO: 51641 - DNA, 20 bp, synthetic construct
  misc_feature 1..20: note = chemically synthesized
  source 1..20: mol_type = other DNA
agacagctattggtctgtta

SEQ ID NO: 51642 - DNA, 20 bp, synthetic construct
  misc_feature 1..20: note = chemically synthesized
  source 1..20: mol_type = other DNA
attgggctttggtggtaact

SEQ ID NO: 51643 - DNA, 20 bp, synthetic construct
  misc_feature 1..20: note = chemically synthesized
  source 1..20: mol_type = other DNA
gaacctgcctatcatgaact

SEQ ID NO: 51644 - DNA, 20 bp, synthetic construct
  misc_feature 1..20: note = chemically synthesized
  source 1..20: mol_type = other DNA
ttgaagtggtgtgtatgtga

SEQ ID NO: 51645 - DNA, 20 bp, synthetic construct
  misc_feature 1..20: note = chemically synthesized
  source 1..20: mol_type = other DNA
tttttcctttatcatgtgac

SEQ ID NO: 51646 - DNA, 20 bp, synthetic construct
  misc_feature 1..20: note = chemically synthesized
  source 1..20: mol_type = other DNA
gttaaccttatgtaataact

SEQ ID NO: 51647 - DNA, 20 bp, synthetic construct
  misc_feature 1..20: note = chemically synthesized
  source 1..20: mol_type = other DNA
ttatgtaataacttttggtt

SEQ ID NO: 51648 - DNA, 20 bp, synthetic construct
  misc_feature 1..20: note = chemically synthesized
  source 1..20: mol_type = other DNA
aacttttggtttggggattg

SEQ ID NO: 51649 - DNA, 20 bp, synthetic construct
  misc_feature 1..20: note = chemically synthesized
  source 1..20: mol_type = other DNA
accttattattgtctttatt

SEQ ID NO: 51650 - DNA, 20 bp, synthetic construct
  misc_feature 1..20: note = chemically synthesized
  source 1..20: mol_type = other DNA
tgtctttatttgaagattat

SEQ ID NO: 51651 - DNA, 20 bp, synthetic construct
  misc_feature 1..20: note = chemically synthesized
  source 1..20: mol_type = other DNA
tgtgatggttaatactgtca

SEQ ID NO: 51652 - DNA, 20 bp, synthetic construct
  misc_feature 1..20: note = chemically synthesized
  source 1..20: mol_type = other DNA
tggttaatactgtcaacttg

SEQ ID NO: 51653 - DNA, 20 bp, synthetic construct
  misc_feature 1..20: note = chemically synthesized
  source 1..20: mol_type = other DNA
gtctgtgagggtgtggcaaa

SEQ ID NO: 51654 - DNA, 22 bp, synthetic construct
  misc_feature 1..22: note = chemically synthesized
  source 1..22: mol_type = other DNA
ccagcccactgactcaaatgtt

SEQ ID NO: 51655 - DNA, 22 bp, synthetic construct
  misc_feature 1..22: note = chemically synthesized
  source 1..22: mol_type = other DNA
actcaaatgttaatctcctttt

SEQ ID NO: 51656 - DNA, 22 bp, synthetic construct
  misc_feature 1..22: note = chemically synthesized
  source 1..22: mol_type = other DNA
aaatgttaatctccttttgcca

SEQ ID NO: 51657 - DNA, 22 bp, synthetic construct
  misc_feature 1..22: note = chemically synthesized
  source 1..22: mol_type = other DNA
atctccttttgccacaccctca

SEQ ID NO: 51658 - DNA, 22 bp, synthetic construct
  misc_feature 1..22: note = chemically synthesized
  source 1..22: mol_type = other DNA
cttttgccacaccctcacagac

SEQ ID NO: 51659 - DNA, 22 bp, synthetic construct
  misc_feature 1..22: note = chemically synthesized
  source 1..22: mol_type = other DNA
ttgccacaccctcacagacata

SEQ ID NO: 51660 - DNA, 22 bp, synthetic construct
  misc_feature 1..22: note = chemically synthesized
  source 1..22: mol_type = other DNA
tgccacaccctcacagacataa

SEQ ID NO: 51661 - DNA, 22 bp, synthetic construct
  misc_feature 1..22: note = chemically synthesized
  source 1..22: mol_type = other DNA
gccacaccctcacagacataac

SEQ ID NO: 51662 - DNA, 22 bp, synthetic construct
  misc_feature 1..22: note = chemically synthesized
  source 1..22: mol_type = other DNA
ccacaccctcacagacataacc

SEQ ID NO: 51663 - DNA, 22 bp, synthetic construct
  misc_feature 1..22: note = chemically synthesized
  source 1..22: mol_type = other DNA
acagacataaccgagattaata

SEQ ID NO: 51664 - DNA, 22 bp, synthetic construct
  misc_feature 1..22: note = chemically synthesized
  source 1..22: mol_type = other DNA
atactttgcatctttcaatcca

SEQ ID NO: 51665 - DNA, 22 bp, synthetic construct
  misc_feature 1..22: note = chemically synthesized
  source 1..22: mol_type = other DNA
tgcatctttcaatccaatcaag

SEQ ID NO: 51666 - DNA, 22 bp, synthetic construct
  misc_feature 1..22: note = chemically synthesized
  source 1..22: mol_type = other DNA
gcatctttcaatccaatcaagt

SEQ ID NO: 51667 - DNA, 22 bp, synthetic construct
  misc_feature 1..22: note = chemically synthesized
  source 1..22: mol_type = other DNA
catctttcaatccaatcaagtt

SEQ ID NO: 51668 - DNA, 22 bp, synthetic construct
  misc_feature 1..22: note = chemically synthesized
  source 1..22: mol_type = other DNA
tcaatccaatcaagttgacagt

SEQ ID NO: 51669 - DNA, 22 bp, synthetic construct
  misc_feature 1..22: note = chemically synthesized
  source 1..22: mol_type = other DNA
caatccaatcaagttgacagta

SEQ ID NO: 51670 - DNA, 22 bp, synthetic construct
  misc_feature 1..22: note = chemically synthesized
  source 1..22: mol_type = other DNA
aatccaatcaagttgacagtat

SEQ ID NO: 51671 - DNA, 22 bp, synthetic construct
  misc_feature 1..22: note = chemically synthesized
  source 1..22: mol_type = other DNA
acagtattaaccatcacaagtc

SEQ ID NO: 51672 - DNA, 22 bp, synthetic construct
  misc_feature 1..22: note = chemically synthesized
  source 1..22: mol_type = other DNA
accatcacaagtccaactcctt

SEQ ID NO: 51673 - DNA, 22 bp, synthetic construct
  misc_feature 1..22: note = chemically synthesized
  source 1..22: mol_type = other DNA
cttgtcaacttgaacccataca

SEQ ID NO: 51674 - DNA, 22 bp, synthetic construct
  misc_feature 1..22: note = chemically synthesized
  source 1..22: mol_type = other DNA
gtcaacttgaacccatacacac

SEQ ID NO: 51675 - DNA, 22 bp, synthetic construct
  misc_feature 1..22: note = chemically synthesized
  source 1..22: mol_type = other DNA
tcaacttgaacccatacacaca

SEQ ID NO: 51676 - DNA, 22 bp, synthetic construct
  misc_feature 1..22: note = chemically synthesized
  source 1..22: mol_type = other DNA
gaacccatacacacatcctgaa

SEQ ID NO: 51677 - DNA, 22 bp, synthetic construct
  misc_feature 1..22: note = chemically synthesized
  source 1..22: mol_type = other DNA
aacccatacacacatcctgaaa

SEQ ID NO: 51678 - DNA, 22 bp, synthetic construct
  misc_feature 1..22: note = chemically synthesized
  source 1..22: mol_type = other DNA
aaatcatacataatcttcaaat

SEQ ID NO: 51679 - DNA, 22 bp, synthetic construct
  misc_feature 1..22: note = chemically synthesized
  source 1..22: mol_type = other DNA
caaataaagacaataataaggt

SEQ ID NO: 51680 - DNA, 22 bp, synthetic construct
  misc_feature 1..22: note = chemically synthesized
  source 1..22: mol_type = other DNA
aaataaagacaataataaggtc

SEQ ID NO: 51681 - DNA, 22 bp, synthetic construct
  misc_feature 1..22: note = chemically synthesized
  source 1..22: mol_type = other DNA
tgcctaatataatacaactatc

SEQ ID NO: 51682 - DNA, 22 bp, synthetic construct
  misc_feature 1..22: note = chemically synthesized
  source 1..22: mol_type = other DNA
atataatacaactatcctcata

SEQ ID NO: 51683 - DNA, 22 bp, synthetic construct
  misc_feature 1..22: note = chemically synthesized
  source 1..22: mol_type = other DNA
tcctcatacaaccagaaacgca

SEQ ID NO: 51684 - DNA, 22 bp, synthetic construct
  misc_feature 1..22: note = chemically synthesized
  source 1..22: mol_type = other DNA
atacaaccagaaacgcaccaat

SEQ ID NO: 51685 - DNA, 22 bp, synthetic construct
  misc_feature 1..22: note = chemically synthesized
  source 1..22: mol_type = other DNA
ttacataaggttaacaatattt

SEQ ID NO: 51686 - DNA, 22 bp, synthetic construct
  misc_feature 1..22: note = chemically synthesized
  source 1..22: mol_type = other DNA
cataaggttaacaatatttaaa

SEQ ID NO: 51687 - DNA, 22 bp, synthetic construct
  misc_feature 1..22: note = chemically synthesized
  source 1..22: mol_type = other DNA
acaatatttaaatgctgatatg

SEQ ID NO: 51688 - DNA, 22 bp, synthetic construct
  misc_feature 1..22: note = chemically synthesized
  source 1..22: mol_type = other DNA
aaatgctgatatgaacaacact

SEQ ID NO: 51689 - DNA, 22 bp, synthetic construct
  misc_feature 1..22: note = chemically synthesized
  source 1..22: mol_type = other DNA
aatgctgatatgaacaacactt

SEQ ID NO: 51690 - DNA, 22 bp, synthetic construct
  misc_feature 1..22: note = chemically synthesized
  source 1..22: mol_type = other DNA
atatgaacaacacttaaatgct

SEQ ID NO: 51691 - DNA, 22 bp, synthetic construct
  misc_feature 1..22: note = chemically synthesized
  source 1..22: mol_type = other DNA
aaatgcttaaatgctgatgtga

SEQ ID NO: 51692 - DNA, 22 bp, synthetic construct
  misc_feature 1..22: note = chemically synthesized
  source 1..22: mol_type = other DNA
aatgcttaaatgctgatgtgaa

SEQ ID NO: 51693 - DNA, 22 bp, synthetic construct
  misc_feature 1..22: note = chemically synthesized
  source 1..22: mol_type = other DNA
aaatgctgatgtgaagtccata

SEQ ID NO: 51694 - DNA, 22 bp, synthetic construct
  misc_feature 1..22: note = chemically synthesized
  source 1..22: mol_type = other DNA
aatgctgatgtgaagtccataa

SEQ ID NO: 51695 - DNA, 22 bp, synthetic construct
  misc_feature 1..22: note = chemically synthesized
  source 1..22: mol_type = other DNA
atgtgaagtccataaatctaag

SEQ ID NO: 51696 - DNA, 22 bp, synthetic construct
  misc_feature 1..22: note = chemically synthesized
  source 1..22: mol_type = other DNA
aggtcacatgataaaggaaaaa

SEQ ID NO: 51697 - DNA, 22 bp, synthetic construct
  misc_feature 1..22: note = chemically synthesized
  source 1..22: mol_type = other DNA
tcttagcacaagtgtacacatg

SEQ ID NO: 51698 - DNA, 22 bp, synthetic construct
  misc_feature 1..22: note = chemically synthesized
  source 1..22: mol_type = other DNA
cttagcacaagtgtacacatgc

SEQ ID NO: 51699 - DNA, 22 bp, synthetic construct
  misc_feature 1..22: note = chemically synthesized
  source 1..22: mol_type = other DNA
ttagcacaagtgtacacatgca

SEQ ID NO: 51700 - DNA, 22 bp, synthetic construct
  misc_feature 1..22: note = chemically synthesized
  source 1..22: mol_type = other DNA
agcacaagtgtacacatgcatt

SEQ ID NO: 51701 - DNA, 22 bp, synthetic construct
  misc_feature 1..22: note = chemically synthesized
  source 1..22: mol_type = other DNA
gcacaagtgtacacatgcattt

SEQ ID NO: 51702 - DNA, 22 bp, synthetic construct
  misc_feature 1..22: note = chemically synthesized
  source 1..22: mol_type = other DNA
agaaagtggatatagtgctgca

SEQ ID NO: 51703 - DNA, 22 bp, synthetic construct
  misc_feature 1..22: note = chemically synthesized
  source 1..22: mol_type = other DNA
gaaagtggatatagtgctgcag

SEQ ID NO: 51704 - DNA, 22 bp, synthetic construct
  misc_feature 1..22: note = chemically synthesized
  source 1..22: mol_type = other DNA
cagctgtccactttcgggtggt

SEQ ID NO: 51705 - DNA, 22 bp, synthetic construct
  misc_feature 1..22: note = chemically synthesized
  source 1..22: mol_type = other DNA
tccactttcgggtggtgcctgc

SEQ ID NO: 51706 - DNA, 22 bp, synthetic construct
  misc_feature 1..22: note = chemically synthesized
  source 1..22: mol_type = other DNA
tcgggtggtgcctgcatatcgt

SEQ ID NO: 51707 - DNA, 22 bp, synthetic construct
  misc_feature 1..22: note = chemically synthesized
  source 1..22: mol_type = other DNA
cgggtggtgcctgcatatcgtg

SEQ ID NO: 51708 - DNA, 22 bp, synthetic construct
  misc_feature 1..22: note = chemically synthesized
  source 1..22: mol_type = other DNA
gggtggtgcctgcatatcgtgc

SEQ ID NO: 51709 - DNA, 22 bp, synthetic construct
  misc_feature 1..22: note = chemically synthesized
  source 1..22: mol_type = other DNA
catatcgtgcagaaccatctat

SEQ ID NO: 51710 - DNA, 22 bp, synthetic construct
  misc_feature 1..22: note = chemically synthesized
  source 1..22: mol_type = other DNA
tgaaccagtccttagtcttccc

SEQ ID NO: 51711 - DNA, 22 bp, synthetic construct
  misc_feature 1..22: note = chemically synthesized
  source 1..22: mol_type = other DNA
agtcttcccttcctctgtcaac

SEQ ID NO: 51712 - DNA, 22 bp, synthetic construct
  misc_feature 1..22: note = chemically synthesized
  source 1..22: mol_type = other DNA
gtcttcccttcctctgtcaact

SEQ ID NO: 51713 - DNA, 22 bp, synthetic construct
  misc_feature 1..22: note = chemically synthesized
  source 1..22: mol_type = other DNA
cccttcctctgtcaactgatca

SEQ ID NO: 51714 - DNA, 22 bp, synthetic construct
  misc_feature 1..22: note = chemically synthesized
  source 1..22: mol_type = other DNA
ccttcctctgtcaactgatcat

SEQ ID NO: 51715 - DNA, 22 bp, synthetic construct
  misc_feature 1..22: note = chemically synthesized
  source 1..22: mol_type = other DNA
cctctgtcaactgatcataggg

SEQ ID NO: 51716 - DNA, 22 bp, synthetic construct
  misc_feature 1..22: note = chemically synthesized
  source 1..22: mol_type = other DNA
ctctgtcaactgatcataggga

SEQ ID NO: 51717 - DNA, 22 bp, synthetic construct
  misc_feature 1..22: note = chemically synthesized
  source 1..22: mol_type = other DNA
tgtcaactgatcatagggaact

SEQ ID NO: 51718 - DNA, 22 bp, synthetic construct
  misc_feature 1..22: note = chemically synthesized
  source 1..22: mol_type = other DNA
tcaactgatcatagggaactcc

SEQ ID NO: 51719 - DNA, 22 bp, synthetic construct
  misc_feature 1..22: note = chemically synthesized
  source 1..22: mol_type = other DNA
atcatagggaactccccatgag

SEQ ID NO: 51720 - DNA, 22 bp, synthetic construct
  misc_feature 1..22: note = chemically synthesized
  source 1..22: mol_type = other DNA
cccatgaggccattggtgcagg

SEQ ID NO: 51721 - DNA, 22 bp, synthetic construct
  misc_feature 1..22: note = chemically synthesized
  source 1..22: mol_type = other DNA
gtgcaggctgggggagggaagg

SEQ ID NO: 51722 - DNA, 22 bp, synthetic construct
  misc_feature 1..22: note = chemically synthesized
  source 1..22: mol_type = other DNA
ggggagggaaggcagggtggca

SEQ ID NO: 51723 - DNA, 22 bp, synthetic construct
  misc_feature 1..22: note = chemically synthesized
  source 1..22: mol_type = other DNA
gagccacttccttatgtaactt

SEQ ID NO: 51724 - DNA, 22 bp, synthetic construct
  misc_feature 1..22: note = chemically synthesized
  source 1..22: mol_type = other DNA
agccacttccttatgtaactta

SEQ ID NO: 51725 - DNA, 22 bp, synthetic construct
  misc_feature 1..22: note = chemically synthesized
  source 1..22: mol_type = other DNA
ccttatgtaacttacttgtgcc

SEQ ID NO: 51726 - DNA, 22 bp, synthetic construct
  misc_feature 1..22: note = chemically synthesized
  source 1..22: mol_type = other DNA
cttatgtaacttacttgtgcct

SEQ ID NO: 51727 - DNA, 22 bp, synthetic construct
  misc_feature 1..22: note = chemically synthesized
  source 1..22: mol_type = other DNA
atgtaacttacttgtgccttca

SEQ ID NO: 51728 - DNA, 22 bp, synthetic construct
  misc_feature 1..22: note = chemically synthesized
  source 1..22: mol_type = other DNA
tgtaacttacttgtgccttcag

SEQ ID NO: 51729 - DNA, 22 bp, synthetic construct
  misc_feature 1..22: note = chemically synthesized
  source 1..22: mol_type = other DNA
acttgtgccttcaggacctgct

SEQ ID NO: 51730 - DNA, 22 bp, synthetic construct
  misc_feature 1..22: note = chemically synthesized
  source 1..22: mol_type = other DNA
cttgtgccttcaggacctgctc

SEQ ID NO: 51731 - DNA, 22 bp, synthetic construct
  misc_feature 1..22: note = chemically synthesized
  source 1..22: mol_type = other DNA
gtgccttcaggacctgctcaag

SEQ ID NO: 51732 - DNA, 22 bp, synthetic construct
  misc_feature 1..22: note = chemically synthesized
  source 1..22: mol_type = other DNA
tgccttcaggacctgctcaagc

SEQ ID NO: 51733 - DNA, 22 bp, synthetic construct
  misc_feature 1..22: note = chemically synthesized
  source 1..22: mol_type = other DNA
caggacctgctcaagcccgatc

SEQ ID NO: 51734 - DNA, 22 bp, synthetic construct
  misc_feature 1..22: note = chemically synthesized
  source 1..22: mol_type = other DNA
aggacctgctcaagcccgatca

SEQ ID NO: 51735 - DNA, 22 bp, synthetic construct
  misc_feature 1..22: note = chemically synthesized
  source 1..22: mol_type = other DNA
ctcaagcccgatcacatacaca

SEQ ID NO: 51736 - DNA, 22 bp, synthetic construct
  misc_feature 1..22: note = chemically synthesized
  source 1..22: mol_type = other DNA
aagcccgatcacatacacacca

SEQ ID NO: 51737 - DNA, 22 bp, synthetic construct
  misc_feature 1..22: note = chemically synthesized
  source 1..22: mol_type = other DNA
caatttgatgatgaaatgccgc

SEQ ID NO: 51738 - DNA, 22 bp, synthetic construct
  misc_feature 1..22: note = chemically synthesized
  source 1..22: mol_type = other DNA
aatttgatgatgaaatgccgct

SEQ ID NO: 51739 - DNA, 22 bp, synthetic construct
  misc_feature 1..22: note = chemically synthesized
  source 1..22: mol_type = other DNA
gatgatgaaatgccgctgtgct

SEQ ID NO: 51740 - DNA, 22 bp, synthetic construct
  misc_feature 1..22: note = chemically synthesized
  source 1..22: mol_type = other DNA
atgatgaaatgccgctgtgctg

SEQ ID NO: 51741 - DNA, 22 bp, synthetic construct
  misc_feature 1..22: note = chemically synthesized
  source 1..22: mol_type = other DNA
tgctgacccacttcatggctag

SEQ ID NO: 51742 - DNA, 22 bp, synthetic construct
  misc_feature 1..22: note = chemically synthesized
  source 1..22: mol_type = other DNA
acccacttcatggctagatggg

SEQ ID NO: 51743 - DNA, 22 bp, synthetic construct
  misc_feature 1..22: note = chemically synthesized
  source 1..22: mol_type = other DNA
catggctagatgggtcagaaag

SEQ ID NO: 51744 - DNA, 22 bp, synthetic construct
  misc_feature 1..22: note = chemically synthesized
  source 1..22: mol_type = other DNA
atggctagatgggtcagaaagc

SEQ ID NO: 51745 - DNA, 22 bp, synthetic construct
  misc_feature 1..22: note = chemically synthesized
  source 1..22: mol_type = other DNA
gatgggtcagaaagcaaccagt

SEQ ID NO: 51746 - DNA, 22 bp, synthetic construct
  misc_feature 1..22: note = chemically synthesized
  source 1..22: mol_type = other DNA
atgataggcaggttcaggtagc

SEQ ID NO: 51747 - DNA, 22 bp, synthetic construct
  misc_feature 1..22: note = chemically synthesized
  source 1..22: mol_type = other DNA
aggtagcatggtgactttatga

SEQ ID NO: 51748 - DNA, 22 bp, synthetic construct
  misc_feature 1..22: note = chemically synthesized
  source 1..22: mol_type = other DNA
tatgacccacagtcaaacgttc

SEQ ID NO: 51749 - DNA, 22 bp, synthetic construct
  misc_feature 1..22: note = chemically synthesized
  source 1..22: mol_type = other DNA
atgacccacagtcaaacgttca

SEQ ID NO: 51750 - DNA, 22 bp, synthetic construct
  misc_feature 1..22: note = chemically synthesized
  source 1..22: mol_type = other DNA
tgacccacagtcaaacgttcag

SEQ ID NO: 51751 - DNA, 22 bp, synthetic construct
  misc_feature 1..22: note = chemically synthesized
  source 1..22: mol_type = other DNA
agttaccaccaaagcccaataa

SEQ ID NO: 51752 - DNA, 22 bp, synthetic construct
  misc_feature 1..22: note = chemically synthesized
  source 1..22: mol_type = other DNA
ccaccaaagcccaataacagac

SEQ ID NO: 51753 - DNA, 22 bp, synthetic construct
  misc_feature 1..22: note = chemically synthesized
  source 1..22: mol_type = other DNA
tctctcaaaaggagagtagtta

SEQ ID NO: 51754 - DNA, 22 bp, synthetic construct
  misc_feature 1..22: note = chemically synthesized
  source 1..22: mol_type = other DNA
tcaaaaggagagtagttatctg

SEQ ID NO: 51755 - DNA, 22 bp, synthetic construct
  misc_feature 1..22: note = chemically synthesized
  source 1..22: mol_type = other DNA
aaaaggagagtagttatctgca

SEQ ID NO: 51756 - DNA, 22 bp, synthetic construct
  misc_feature 1..22: note = chemically synthesized
  source 1..22: mol_type = other DNA
tctgcagaagtggcagggcctt

SEQ ID NO: 51757 - DNA, 22 bp, synthetic construct
  misc_feature 1..22: note = chemically synthesized
  source 1..22: mol_type = other DNA
cagaagtggcagggccttgctc

SEQ ID NO: 51758 - DNA, 22 bp, synthetic construct
  misc_feature 1..22: note = chemically synthesized
  source 1..22: mol_type = other DNA
gctccaaaatcctagaggtctc

SEQ ID NO: 51759 - DNA, 22 bp, synthetic construct
  misc_feature 1..22: note = chemically synthesized
  source 1..22: mol_type = other DNA
ctccaaaatcctagaggtctcc

SEQ ID NO: 51760 - DNA, 22 bp, synthetic construct
  misc_feature 1..22: note = chemically synthesized
  source 1..22: mol_type = other DNA
caaaatcctagaggtctccact

SEQ ID NO: 51761 - DNA, 22 bp, synthetic construct
  misc_feature 1..22: note = chemically synthesized
  source 1..22: mol_type = other DNA
gaggtctccactgtgattcacc

SEQ ID NO: 51762 - DNA, 22 bp, synthetic construct
  misc_feature 1..22: note = chemically synthesized
  source 1..22: mol_type = other DNA
cactgtgattcacctatggggg

SEQ ID NO: 51763 - DNA, 22 bp, synthetic construct
  misc_feature 1..22: note = chemically synthesized
  source 1..22: mol_type = other DNA
tgattcacctatgggggcctgc

SEQ ID NO: 51764 - DNA, 22 bp, synthetic construct
  misc_feature 1..22: note = chemically synthesized
  source 1..22: mol_type = other DNA
acctatgggggcctgccaaagg

SEQ ID NO: 51765 - DNA, 22 bp, synthetic construct
  misc_feature 1..22: note = chemically synthesized
  source 1..22: mol_type = other DNA
tgggggcctgccaaaggctcca

SEQ ID NO: 51766 - DNA, 22 bp, synthetic construct
  misc_feature 1..22: note = chemically synthesized
  source 1..22: mol_type = other DNA
ccaaaggctccaaacagcatcc

SEQ ID NO: 51767 - DNA, 22 bp, synthetic construct
  misc_feature 1..22: note = chemically synthesized
  source 1..22: mol_type = other DNA
caaacagcatccctatctgcca

SEQ ID NO: 51768 - DNA, 22 bp, synthetic construct
  misc_feature 1..22: note = chemically synthesized
  source 1..22: mol_type = other DNA
tctgccactgacacctcaagca

SEQ ID NO: 51769 - DNA, 22 bp, synthetic construct
  misc_feature 1..22: note = chemically synthesized
  source 1..22: mol_type = other DNA
ccactgacacctcaagcaccat

SEQ ID NO: 51770 - DNA, 22 bp, synthetic construct
  misc_feature 1..22: note = chemically synthesized
  source 1..22: mol_type = other DNA
acacctcaagcaccattggatc

SEQ ID NO: 51771 - DNA, 22 bp, synthetic construct
  misc_feature 1..22: note = chemically synthesized
  source 1..22: mol_type = other DNA
aagcaccattggatctgcgggg

SEQ ID NO: 51772 - DNA, 22 bp, synthetic construct
  misc_feature 1..22: note = chemically synthesized
  source 1..22: mol_type = other DNA
gatctgcggggtcatgtggccc

SEQ ID NO: 51773 - DNA, 22 bp, synthetic construct
  misc_feature 1..22: note = chemically synthesized
  source 1..22: mol_type = other DNA
cggggtcatgtggcccaaatgg

SEQ ID NO: 51774 - DNA, 22 bp, synthetic construct
  misc_feature 1..22: note = chemically synthesized
  source 1..22: mol_type = other DNA
tcacagcagcctggacctgttt

SEQ ID NO: 51775 - DNA, 22 bp, synthetic construct
  misc_feature 1..22: note = chemically synthesized
  source 1..22: mol_type = other DNA
cacagcagcctggacctgtttc

SEQ ID NO: 51776 - DNA, 22 bp, synthetic construct
  misc_feature 1..22: note = chemically synthesized
  source 1..22: mol_type = other DNA
acagcagcctggacctgtttca

SEQ ID NO: 51777 - DNA, 22 bp, synthetic construct
  misc_feature 1..22: note = chemically synthesized
  source 1..22: mol_type = other DNA
gacctgtttcagagccttcttt

SEQ ID NO: 51778 - DNA, 22 bp, synthetic construct
  misc_feature 1..22: note = chemically synthesized
  source 1..22: mol_type = other DNA
tttcagagccttcttttgttct

SEQ ID NO: 51779 - DNA, 22 bp, synthetic construct
  misc_feature 1..22: note = chemically synthesized
  source 1..22: mol_type = other DNA
cagagccttcttttgttctaga

SEQ ID NO: 51780 - DNA, 22 bp, synthetic construct
  misc_feature 1..22: note = chemically synthesized
  source 1..22: mol_type = other DNA
agagccttcttttgttctagac

SEQ ID NO: 51781 - DNA, 22 bp, synthetic construct
  misc_feature 1..22: note = chemically synthesized
  source 1..22: mol_type = other DNA
cttttgttctagactgcactta

SEQ ID NO: 51782 - DNA, 22 bp, synthetic construct
  misc_feature 1..22: note = chemically synthesized
  source 1..22: mol_type = other DNA
ttttgttctagactgcacttaa

SEQ ID NO: 51783 - DNA, 22 bp, synthetic construct
  misc_feature 1..22: note = chemically synthesized
  source 1..22: mol_type = other DNA
ttgttctagactgcacttaaat

SEQ ID NO: 51784 - DNA, 22 bp, synthetic construct
  misc_feature 1..22: note = chemically synthesized
  source 1..22: mol_type = other DNA
tgttctagactgcacttaaatc

SEQ ID NO: 51785 - DNA, 22 bp, synthetic construct
  misc_feature 1..22: note = chemically synthesized
  source 1..22: mol_type = other DNA
gttctagactgcacttaaatct

SEQ ID NO: 51786 - DNA, 22 bp, synthetic construct
  misc_feature 1..22: note = chemically synthesized
  source 1..22: mol_type = other DNA
ttctagactgcacttaaatctg

SEQ ID NO: 51787 - DNA, 22 bp, synthetic construct
  misc_feature 1..22: note = chemically synthesized
  source 1..22: mol_type = other DNA
tagactgcacttaaatctggca

SEQ ID NO: 51788 - DNA, 22 bp, synthetic construct
  misc_feature 1..22: note = chemically synthesized
  source 1..22: mol_type = other DNA
gactgcacttaaatctggcagc

SEQ ID NO: 51789 - DNA, 22 bp, synthetic construct
  misc_feature 1..22: note = chemically synthesized
  source 1..22: mol_type = other DNA
cacttaaatctggcagcctttc

SEQ ID NO: 51790 - DNA, 22 bp, synthetic construct
  misc_feature 1..22: note = chemically synthesized
  source 1..22: mol_type = other DNA
aaatctggcagcctttcaggtc

SEQ ID NO: 51791 - DNA, 22 bp, synthetic construct
  misc_feature 1..22: note = chemically synthesized
  source 1..22: mol_type = other DNA
aatctggcagcctttcaggtca

SEQ ID NO: 51792 - DNA, 22 bp, synthetic construct
  misc_feature 1..22: note = chemically synthesized
  source 1..22: mol_type = other DNA
gcagcctttcaggtcactcgat

SEQ ID NO: 51793 - DNA, 22 bp, synthetic construct
  misc_feature 1..22: note = chemically synthesized
  source 1..22: mol_type = other DNA
tcaggtcactcgataaatgggc

SEQ ID NO: 51794 - DNA, 22 bp, synthetic construct
  misc_feature 1..22: note = chemically synthesized
  source 1..22: mol_type = other DNA
caggtcactcgataaatgggcc

SEQ ID NO: 51795 - DNA, 22 bp, synthetic construct
  misc_feature 1..22: note = chemically synthesized
  source 1..22: mol_type = other DNA
aggtcactcgataaatgggcca

SEQ ID NO: 51796 - DNA, 22 bp, synthetic construct
  misc_feature 1..22: note = chemically synthesized
  source 1..22: mol_type = other DNA
gataaatgggccagagtaacac

SEQ ID NO: 51797 - DNA, 22 bp, synthetic construct
  misc_feature 1..22: note = chemically synthesized
  source 1..22: mol_type = other DNA
cctccaaaatccaaataggccc

SEQ ID NO: 51798 - DNA, 22 bp, synthetic construct
  misc_feature 1..22: note = chemically synthesized
  source 1..22: mol_type = other DNA
caaaatccaaataggcccacca

SEQ ID NO: 51799 - DNA, 22 bp, synthetic construct
  misc_feature 1..22: note = chemically synthesized
  source 1..22: mol_type = other DNA
tgcctctttcttggttgtaaga

SEQ ID NO: 51800 - DNA, 22 bp, synthetic construct
  misc_feature 1..22: note = chemically synthesized
  source 1..22: mol_type = other DNA
tttcttggttgtaagaggggcc

SEQ ID NO: 51801 - DNA, 22 bp, synthetic construct
  misc_feature 1..22: note = chemically synthesized
  source 1..22: mol_type = other DNA
tcttggttgtaagaggggccaa

SEQ ID NO: 51802 - DNA, 22 bp, synthetic construct
  misc_feature 1..22: note = chemically synthesized
  source 1..22: mol_type = other DNA
cttggttgtaagaggggccaaa

SEQ ID NO: 51803 - DNA, 22 bp, synthetic construct
  misc_feature 1..22: note = chemically synthesized
  source 1..22: mol_type = other DNA
ttggttgtaagaggggccaaac

SEQ ID NO: 51804 - DNA, 22 bp, synthetic construct
  misc_feature 1..22: note = chemically synthesized
  source 1..22: mol_type = other DNA
ggttgtaagaggggccaaacgc

SEQ ID NO: 51805 - DNA, 22 bp, synthetic construct
  misc_feature 1..22: note = chemically synthesized
  source 1..22: mol_type = other DNA
gttgtaagaggggccaaacgca

SEQ ID NO: 51806 - DNA, 22 bp, synthetic construct
  misc_feature 1..22: note = chemically synthesized
  source 1..22: mol_type = other DNA
taagaggggccaaacgcagcaa

SEQ ID NO: 51807 - DNA, 22 bp, synthetic construct
  misc_feature 1..22: note = chemically synthesized
  source 1..22: mol_type = other DNA
tgcttcaccttagaaggaatat

SEQ ID NO: 51808 - DNA, 22 bp, synthetic construct
  misc_feature 1..22: note = chemically synthesized
  source 1..22: mol_type = other DNA
caccttagaaggaatatctcca

SEQ ID NO: 51809 - DNA, 22 bp, synthetic construct
  misc_feature 1..22: note = chemically synthesized
  source 1..22: mol_type = other DNA
accttagaaggaatatctccat

SEQ ID NO: 51810 - DNA, 22 bp, synthetic construct
  misc_feature 1..22: note = chemically synthesized
  source 1..22: mol_type = other DNA
agaaggaatatctccataggtc

SEQ ID NO: 51811 - DNA, 22 bp, synthetic construct
  misc_feature 1..22: note = chemically synthesized
  source 1..22: mol_type = other DNA
gaaggaatatctccataggtct

SEQ ID NO: 51812 - DNA, 22 bp, synthetic construct
  misc_feature 1..22: note = chemically synthesized
  source 1..22: mol_type = other DNA
cataggtctcatgccactggaa

SEQ ID NO: 51813 - DNA, 22 bp, synthetic construct
  misc_feature 1..22: note = chemically synthesized
  source 1..22: mol_type = other DNA
atgccactggaaccctagaaat

SEQ ID NO: 51814 - DNA, 22 bp, synthetic construct
  misc_feature 1..22: note = chemically synthesized
  source 1..22: mol_type = other DNA
gaaccctagaaattttaccgag

SEQ ID NO: 51815 - DNA, 22 bp, synthetic construct
  misc_feature 1..22: note = chemically synthesized
  source 1..22: mol_type = other DNA
gaaattttaccgaggtagaaag

SEQ ID NO: 51816 - DNA, 22 bp, synthetic construct
  misc_feature 1..22: note = chemically synthesized
  source 1..22: mol_type = other DNA
taccgaggtagaaagtccctaa

SEQ ID NO: 51817 - DNA, 22 bp, synthetic construct
  misc_feature 1..22: note = chemically synthesized
  source 1..22: mol_type = other DNA
accgaggtagaaagtccctaaa

SEQ ID NO: 51818 - DNA, 22 bp, synthetic construct
  misc_feature 1..22: note = chemically synthesized
  source 1..22: mol_type = other DNA
ccgaggtagaaagtccctaaat

SEQ ID NO: 51819 - DNA, 22 bp, synthetic construct
  misc_feature 1..22: note = chemically synthesized
  source 1..22: mol_type = other DNA
aattttagctggatttatttcc

SEQ ID NO: 51820 - DNA, 22 bp, synthetic construct
  misc_feature 1..22: note = chemically synthesized
  source 1..22: mol_type = other DNA
tagctggatttatttcccatcc

SEQ ID NO: 51821 - DNA, 22 bp, synthetic construct
  misc_feature 1..22: note = chemically synthesized
  source 1..22: mol_type = other DNA
agctggatttatttcccatcct

SEQ ID NO: 51822 - DNA, 22 bp, synthetic construct
  misc_feature 1..22: note = chemically synthesized
  source 1..22: mol_type = other DNA
gctggatttatttcccatcctc

SEQ ID NO: 51823 - DNA, 22 bp, synthetic construct
  misc_feature 1..22: note = chemically synthesized
  source 1..22: mol_type = other DNA
gatttatttcccatcctctggc

SEQ ID NO: 51824 - DNA, 22 bp, synthetic construct
  misc_feature 1..22: note = chemically synthesized
  source 1..22: mol_type = other DNA
atttcccatcctctggcataca

SEQ ID NO: 51825 - DNA, 22 bp, synthetic construct
  misc_feature 1..22: note = chemically synthesized
  source 1..22: mol_type = other DNA
tttcccatcctctggcatacaa

SEQ ID NO: 51826 - DNA, 22 bp, synthetic construct
  misc_feature 1..22: note = chemically synthesized
  source 1..22: mol_type = other DNA
cccatcctctggcatacaaatg

SEQ ID NO: 51827 - DNA, 22 bp, synthetic construct
  misc_feature 1..22: note = chemically synthesized
  source 1..22: mol_type = other DNA
ccatcctctggcatacaaatgt

SEQ ID NO: 51828 - DNA, 22 bp, synthetic construct
  misc_feature 1..22: note = chemically synthesized
  source 1..22: mol_type = other DNA
tggcatacaaatgtctcaccaa

SEQ ID NO: 51829 - DNA, 22 bp, synthetic construct
  misc_feature 1..22: note = chemically synthesized
  source 1..22: mol_type = other DNA
gcatacaaatgtctcaccaata

SEQ ID NO: 51830 - DNA, 22 bp, synthetic construct
  misc_feature 1..22: note = chemically synthesized
  source 1..22: mol_type = other DNA
accaataagttcagtgtgtttg

SEQ ID NO: 51831 - DNA, 22 bp, synthetic construct
  misc_feature 1..22: note = chemically synthesized
  source 1..22: mol_type = other DNA
agtgtgtttgctacttcttgct

SEQ ID NO: 51832 - DNA, 22 bp, synthetic construct
  misc_feature 1..22: note = chemically synthesized
  source 1..22: mol_type = other DNA
gctacttcttgctcactgtatc

SEQ ID NO: 51833 - DNA, 22 bp, synthetic construct
  misc_feature 1..22: note = chemically synthesized
  source 1..22: mol_type = other DNA
ctacttcttgctcactgtatcc

SEQ ID NO: 51834 - DNA, 22 bp, synthetic construct
  misc_feature 1..22: note = chemically synthesized
  source 1..22: mol_type = other DNA
cttcttgctcactgtatccaat

SEQ ID NO: 51835 - DNA, 22 bp, synthetic construct
  misc_feature 1..22: note = chemically synthesized
  source 1..22: mol_type = other DNA
cttgctcactgtatccaatcat

SEQ ID NO: 51836 - DNA, 22 bp, synthetic construct
  misc_feature 1..22: note = chemically synthesized
  source 1..22: mol_type = other DNA
ttgctcactgtatccaatcatc

SEQ ID NO: 51837 - DNA, 22 bp, synthetic construct
  misc_feature 1..22: note = chemically synthesized
  source 1..22: mol_type = other DNA
gctcactgtatccaatcatcat

SEQ ID NO: 51838 - DNA, 22 bp, synthetic construct
  misc_feature 1..22: note = chemically synthesized
  source 1..22: mol_type = other DNA
ctcactgtatccaatcatcata

SEQ ID NO: 51839 - DNA, 22 bp, synthetic construct
  misc_feature 1..22: note = chemically synthesized
  source 1..22: mol_type = other DNA
actgtatccaatcatcataatg

SEQ ID NO: 51840 - DNA, 22 bp, synthetic construct
  misc_feature 1..22: note = chemically synthesized
  source 1..22: mol_type = other DNA
tatccaatcatcataatgtcat

SEQ ID NO: 51841 - DNA, 22 bp, synthetic construct
  misc_feature 1..22: note = chemically synthesized
  source 1..22: mol_type = other DNA
tatctcgtggaagtgaaaagcg

SEQ ID NO: 51842 - DNA, 22 bp, synthetic construct
  misc_feature 1..22: note = chemically synthesized
  source 1..22: mol_type = other DNA
gtggaagtgaaaagcgagcaag

SEQ ID NO: 51843 - DNA, 22 bp, synthetic construct
  misc_feature 1..22: note = chemically synthesized
  source 1..22: mol_type = other DNA
tccaaataagattatgacacaa

SEQ ID NO: 51844 - DNA, 22 bp, synthetic construct
  misc_feature 1..22: note = chemically synthesized
  source 1..22: mol_type = other DNA
caaataagattatgacacaaag

SEQ ID NO: 51845 - DNA, 22 bp, synthetic construct
  misc_feature 1..22: note = chemically synthesized
  source 1..22: mol_type = other DNA
tgacacaaagctggagagttga

SEQ ID NO: 51846 - DNA, 22 bp, synthetic construct
  misc_feature 1..22: note = chemically synthesized
  source 1..22: mol_type = other DNA
gagagttgatacacccctgagg

SEQ ID NO: 51847 - DNA, 22 bp, synthetic construct
  misc_feature 1..22: note = chemically synthesized
  source 1..22: mol_type = other DNA
atacacccctgaggtagggtgg

SEQ ID NO: 51848 - DNA, 22 bp, synthetic construct
  misc_feature 1..22: note = chemically synthesized
  source 1..22: mol_type = other DNA
aggtagggtggtaaaggtataa

SEQ ID NO: 51849 - DNA, 22 bp, synthetic construct
  misc_feature 1..22: note = chemically synthesized
  source 1..22: mol_type = other DNA
gccttgtcagctgaaggcaaat

SEQ ID NO: 51850 - DNA, 22 bp, synthetic construct
  misc_feature 1..22: note = chemically synthesized
  source 1..22: mol_type = other DNA
gtcagctgaaggcaaattgctt

SEQ ID NO: 51851 - DNA, 22 bp, synthetic construct
  misc_feature 1..22: note = chemically synthesized
  source 1..22: mol_type = other DNA
tcagctgaaggcaaattgcttc

SEQ ID NO: 51852 - DNA, 22 bp, synthetic construct
  misc_feature 1..22: note = chemically synthesized
  source 1..22: mol_type = other DNA
aaggcaaattgcttctggtggg

SEQ ID NO: 51853 - DNA, 22 bp, synthetic construct
  misc_feature 1..22: note = chemically synthesized
  source 1..22: mol_type = other DNA
cttctggtgggtcttatggaca

SEQ ID NO: 51854 - DNA, 22 bp, synthetic construct
  misc_feature 1..22: note = chemically synthesized
  source 1..22: mol_type = other DNA
ctggtgggtcttatggacagga

SEQ ID NO: 51855 - DNA, 22 bp, synthetic construct
  misc_feature 1..22: note = chemically synthesized
  source 1..22: mol_type = other DNA
tggtgggtcttatggacaggaa

SEQ ID NO: 51856 - DNA, 22 bp, synthetic construct
  misc_feature 1..22: note = chemically synthesized
  source 1..22: mol_type = other DNA
gtgggtcttatggacaggaatg

SEQ ID NO: 51857 - DNA, 22 bp, synthetic construct
  misc_feature 1..22: note = chemically synthesized
  source 1..22: mol_type = other DNA
atggacaggaatggagaaaaag

SEQ ID NO: 51858 - DNA, 22 bp, synthetic construct
  misc_feature 1..22: note = chemically synthesized
  source 1..22: mol_type = other DNA
tggacaggaatggagaaaaagc

SEQ ID NO: 51859 - DNA, 22 bp, synthetic construct
  misc_feature 1..22: note = chemically synthesized
  source 1..22: mol_type = other DNA
gccaagccaatggctgcatacc

SEQ ID NO: 51860 - DNA, 22 bp, synthetic construct
  misc_feature 1..22: note = chemically synthesized
  source 1..22: mol_type = other DNA
ccaagccaatggctgcatacca

SEQ ID NO: 51861 - DNA, 22 bp, synthetic construct
  misc_feature 1..22: note = chemically synthesized
  source 1..22: mol_type = other DNA
cataccaggcaccaggagatgt

SEQ ID NO: 51862 - DNA, 22 bp, synthetic construct
  misc_feature 1..22: note = chemically synthesized
  source 1..22: mol_type = other DNA
atttgctcaagcaacaaaacca

SEQ ID NO: 51863 - DNA, 22 bp, synthetic construct
  misc_feature 1..22: note = chemically synthesized
  source 1..22: mol_type = other DNA
gctcaagcaacaaaaccacaac

SEQ ID NO: 51864 - DNA, 22 bp, synthetic construct
  misc_feature 1..22: note = chemically synthesized
  source 1..22: mol_type = other DNA
ctcaagcaacaaaaccacaact

SEQ ID NO: 51865 - DNA, 22 bp, synthetic construct
  misc_feature 1..22: note = chemically synthesized
  source 1..22: mol_type = other DNA
aagcaacaaaaccacaactggt

SEQ ID NO: 51866 - DNA, 22 bp, synthetic construct
  misc_feature 1..22: note = chemically synthesized
  source 1..22: mol_type = other DNA
gtagagcagctgcaattggagt

SEQ ID NO: 51867 - DNA, 22 bp, synthetic construct
  misc_feature 1..22: note = chemically synthesized
  source 1..22: mol_type = other DNA
caattggagtcaccacttggtt

SEQ ID NO: 51868 - DNA, 22 bp, synthetic construct
  misc_feature 1..22: note = chemically synthesized
  source 1..22: mol_type = other DNA
gagtcaccacttggttaagctt

SEQ ID NO: 51869 - DNA, 22 bp, synthetic construct
  misc_feature 1..22: note = chemically synthesized
  source 1..22: mol_type = other DNA
ggttaagcttaaaataatccac

SEQ ID NO: 51870 - DNA, 22 bp, synthetic construct
  misc_feature 1..22: note = chemically synthesized
  source 1..22: mol_type = other DNA
gttaagcttaaaataatccacc

SEQ ID NO: 51871 - DNA, 22 bp, synthetic construct
  misc_feature 1..22: note = chemically synthesized
  source 1..22: mol_type = other DNA
agcttaaaataatccaccatca

SEQ ID NO: 51872 - DNA, 22 bp, synthetic construct
  misc_feature 1..22: note = chemically synthesized
  source 1..22: mol_type = other DNA
aaaataatccaccatcattttc

SEQ ID NO: 51873 - DNA, 22 bp, synthetic construct
  misc_feature 1..22: note = chemically synthesized
  source 1..22: mol_type = other DNA
aaataatccaccatcattttcc

SEQ ID NO: 51874 - DNA, 22 bp, synthetic construct
  misc_feature 1..22: note = chemically synthesized
  source 1..22: mol_type = other DNA
tccaagatccatctgtcctctg

SEQ ID NO: 51875 - DNA, 22 bp, synthetic construct
  misc_feature 1..22: note = chemically synthesized
  source 1..22: mol_type = other DNA
ccaagatccatctgtcctctgc

SEQ ID NO: 51876 - DNA, 22 bp, synthetic construct
  misc_feature 1..22: note = chemically synthesized
  source 1..22: mol_type = other DNA
caagatccatctgtcctctgca

SEQ ID NO: 51877 - DNA, 22 bp, synthetic construct
  misc_feature 1..22: note = chemically synthesized
  source 1..22: mol_type = other DNA
tcctctgcacaggtcaaatggg

SEQ ID NO: 51878 - DNA, 22 bp, synthetic construct
  misc_feature 1..22: note = chemically synthesized
  source 1..22: mol_type = other DNA
tgcacaggtcaaatgggagagt

SEQ ID NO: 51879 - DNA, 22 bp, synthetic construct
  misc_feature 1..22: note = chemically synthesized
  source 1..22: mol_type = other DNA
cacaggtcaaatgggagagttg

SEQ ID NO: 51880 - DNA, 22 bp, synthetic construct
  misc_feature 1..22: note = chemically synthesized
  source 1..22: mol_type = other DNA
aacagggatgtggtgggaatca

SEQ ID NO: 51881 - DNA, 22 bp, synthetic construct
  misc_feature 1..22: note = chemically synthesized
  source 1..22: mol_type = other DNA
cgtctttcaagtccttgatggt

SEQ ID NO: 51882 - DNA, 22 bp, synthetic construct
  misc_feature 1..22: note = chemically synthesized
  source 1..22: mol_type = other DNA
tcaagtccttgatggtgacact

SEQ ID NO: 51883 - DNA, 22 bp, synthetic construct
  misc_feature 1..22: note = chemically synthesized
  source 1..22: mol_type = other DNA
caagtccttgatggtgacacta

SEQ ID NO: 51884 - DNA, 22 bp, synthetic construct
  misc_feature 1..22: note = chemically synthesized
  source 1..22: mol_type = other DNA
aagtccttgatggtgacactaa

SEQ ID NO: 51885 - DNA, 22 bp, synthetic construct
  misc_feature 1..22: note = chemically synthesized
  source 1..22: mol_type = other DNA
gatggtgacactaatcacttca

SEQ ID NO: 51886 - DNA, 22 bp, synthetic construct
  misc_feature 1..22: note = chemically synthesized
  source 1..22: mol_type = other DNA
atggtgacactaatcacttcag

SEQ ID NO: 51887 - DNA, 22 bp, synthetic construct
  misc_feature 1..22: note = chemically synthesized
  source 1..22: mol_type = other DNA
atcacttcagtccctccaggga

SEQ ID NO: 51888 - DNA, 22 bp, synthetic construct
  misc_feature 1..22: note = chemically synthesized
  source 1..22: mol_type = other DNA
cagtccctccagggatgggata

SEQ ID NO: 51889 - DNA, 22 bp, synthetic construct
  misc_feature 1..22: note = chemically synthesized
  source 1..22: mol_type = other DNA
agtccctccagggatgggatat

SEQ ID NO: 51890 - DNA, 22 bp, synthetic construct
  misc_feature 1..22: note = chemically synthesized
  source 1..22: mol_type = other DNA
cagggatgggatattgtttttg

SEQ ID NO: 51891 - DNA, 22 bp, synthetic construct
  misc_feature 1..22: note = chemically synthesized
  source 1..22: mol_type = other DNA
tttttgatttttttatttttct

SEQ ID NO: 51892 - DNA, 22 bp, synthetic construct
  misc_feature 1..22: note = chemically synthesized
  source 1..22: mol_type = other DNA
ttgatttttttatttttctagg

SEQ ID NO: 51893 - DNA, 22 bp, synthetic construct
  misc_feature 1..22: note = chemically synthesized
  source 1..22: mol_type = other DNA
tgatttttttatttttctaggt

SEQ ID NO: 51894 - DNA, 22 bp, synthetic construct
  misc_feature 1..22: note = chemically synthesized
  source 1..22: mol_type = other DNA
gatttttttatttttctaggta

SEQ ID NO: 51895 - DNA, 22 bp, synthetic construct
  misc_feature 1..22: note = chemically synthesized
  source 1..22: mol_type = other DNA
atttttttatttttctaggtag

SEQ ID NO: 51896 - DNA, 22 bp, synthetic construct
  misc_feature 1..22: note = chemically synthesized
  source 1..22: mol_type = other DNA
ttttatttttctaggtagagac

SEQ ID NO: 51897 - DNA, 22 bp, synthetic construct
  misc_feature 1..22: note = chemically synthesized
  source 1..22: mol_type = other DNA
tttatttttctaggtagagaca

SEQ ID NO: 51898 - DNA, 22 bp, synthetic construct
  misc_feature 1..22: note = chemically synthesized
  source 1..22: mol_type = other DNA
ttatttttctaggtagagacag

SEQ ID NO: 51899 - DNA, 22 bp, synthetic construct
  misc_feature 1..22: note = chemically synthesized
  source 1..22: mol_type = other DNA
tatttttctaggtagagacagc

SEQ ID NO: 51900 - DNA, 22 bp, synthetic construct
  misc_feature 1..22: note = chemically synthesized
  source 1..22: mol_type = other DNA
atttttctaggtagagacagct

SEQ ID NO: 51901 - DNA, 22 bp, synthetic construct
  misc_feature 1..22: note = chemically synthesized
  source 1..22: mol_type = other DNA
tttttctaggtagagacagctc

SEQ ID NO: 51902 - DNA, 22 bp, synthetic construct
  misc_feature 1..22: note = chemically synthesized
  source 1..22: mol_type = other DNA
ttctaggtagagacagctctaa

SEQ ID NO: 51903 - DNA, 22 bp, synthetic construct
  misc_feature 1..22: note = chemically synthesized
  source 1..22: mol_type = other DNA
tctaggtagagacagctctaat

SEQ ID NO: 51904 - DNA, 22 bp, synthetic construct
  misc_feature 1..22: note = chemically synthesized
  source 1..22: mol_type = other DNA
ctaggtagagacagctctaatg

SEQ ID NO: 51905 - DNA, 22 bp, synthetic construct
  misc_feature 1..22: note = chemically synthesized
  source 1..22: mol_type = other DNA
taggtagagacagctctaatgg

SEQ ID NO: 51906 - DNA, 22 bp, synthetic construct
  misc_feature 1..22: note = chemically synthesized
  source 1..22: mol_type = other DNA
ggtagagacagctctaatggct

SEQ ID NO: 51907 - DNA, 22 bp, synthetic construct
  misc_feature 1..22: note = chemically synthesized
  source 1..22: mol_type = other DNA
taatggcttctgtttggccttt

SEQ ID NO: 51908 - DNA, 22 bp, synthetic construct
  misc_feature 1..22: note = chemically synthesized
  source 1..22: mol_type = other DNA
atggcttctgtttggcctttcc

SEQ ID NO: 51909 - DNA, 22 bp, synthetic construct
  misc_feature 1..22: note = chemically synthesized
  source 1..22: mol_type = other DNA
ctgtttggcctttcccaccata

SEQ ID NO: 51910 - DNA, 22 bp, synthetic construct
  misc_feature 1..22: note = chemically synthesized
  source 1..22: mol_type = other DNA
tgtttggcctttcccaccataa

SEQ ID NO: 51911 - DNA, 22 bp, synthetic construct
  misc_feature 1..22: note = chemically synthesized
  source 1..22: mol_type = other DNA
tttggcctttcccaccataata

SEQ ID NO: 51912 - DNA, 22 bp, synthetic construct
  misc_feature 1..22: note = chemically synthesized
  source 1..22: mol_type = other DNA
ggcctttcccaccataatagcc

SEQ ID NO: 51913 - DNA, 22 bp, synthetic construct
  misc_feature 1..22: note = chemically synthesized
  source 1..22: mol_type = other DNA
gcctttcccaccataatagccc

SEQ ID NO: 51914 - DNA, 22 bp, synthetic construct
  misc_feature 1..22: note = chemically synthesized
  source 1..22: mol_type = other DNA
tcccaccataatagccctcatc

SEQ ID NO: 51915 - DNA, 22 bp, synthetic construct
  misc_feature 1..22: note = chemically synthesized
  source 1..22: mol_type = other DNA
cccaccataatagccctcatcc

SEQ ID NO: 51916 - DNA, 22 bp, synthetic construct
  misc_feature 1..22: note = chemically synthesized
  source 1..22: mol_type = other DNA
ccaccataatagccctcatcct

SEQ ID NO: 51917 - DNA, 22 bp, synthetic construct
  misc_feature 1..22: note = chemically synthesized
  source 1..22: mol_type = other DNA
atcctaccagtcagggagccaa

SEQ ID NO: 51918 - DNA, 22 bp, synthetic construct
  misc_feature 1..22: note = chemically synthesized
  source 1..22: mol_type = other DNA
ccagtcagggagccaatgtggc

SEQ ID NO: 51919 - DNA, 22 bp, synthetic construct
  misc_feature 1..22: note = chemically synthesized
  source 1..22: mol_type = other DNA
ctgccagctaataagtatgtct

SEQ ID NO: 51920 - DNA, 22 bp, synthetic construct
  misc_feature 1..22: note = chemically synthesized
  source 1..22: mol_type = other DNA
tgccagctaataagtatgtcta

SEQ ID NO: 51921 - DNA, 22 bp, synthetic construct
  misc_feature 1..22: note = chemically synthesized
  source 1..22: mol_type = other DNA
ccagctaataagtatgtctata

SEQ ID NO: 51922 - DNA, 22 bp, synthetic construct
  misc_feature 1..22: note = chemically synthesized
  source 1..22: mol_type = other DNA
ataagtatgtctatacaaatta

SEQ ID NO: 51923 - DNA, 22 bp, synthetic construct
  misc_feature 1..22: note = chemically synthesized
  source 1..22: mol_type = other DNA
tacaaattatgcattttggcac

SEQ ID NO: 51924 - DNA, 22 bp, synthetic construct
  misc_feature 1..22: note = chemically synthesized
  source 1..22: mol_type = other DNA
tgcattttggcactgggaaaat

SEQ ID NO: 51925 - DNA, 22 bp, synthetic construct
  misc_feature 1..22: note = chemically synthesized
  source 1..22: mol_type = other DNA
tggcactgggaaaatgaccaga

SEQ ID NO: 51926 - DNA, 22 bp, synthetic construct
  misc_feature 1..22: note = chemically synthesized
  source 1..22: mol_type = other DNA
ggcactgggaaaatgaccagag

SEQ ID NO: 51927 - DNA, 22 bp, synthetic construct
  misc_feature 1..22: note = chemically synthesized
  source 1..22: mol_type = other DNA
gcactgggaaaatgaccagagg

SEQ ID NO: 51928 - DNA, 22 bp, synthetic construct
  misc_feature 1..22: note = chemically synthesized
  source 1..22: mol_type = other DNA
ggaaaatgaccagaggataagt

SEQ ID NO: 51929 - DNA, 22 bp, synthetic construct
  misc_feature 1..22: note = chemically synthesized
  source 1..22: mol_type = other DNA
gaaccactgtaagtcagaaatg

SEQ ID NO: 51930 - DNA, 22 bp, synthetic construct
  misc_feature 1..22: note = chemically synthesized
  source 1..22: mol_type = other DNA
taagtcagaaatgagctaaaac

SEQ ID NO: 51931 - DNA, 22 bp, synthetic construct
  misc_feature 1..22: note = chemically synthesized
  source 1..22: mol_type = other DNA
aaactccattaattacctaacc

SEQ ID NO: 51932 - DNA, 22 bp, synthetic construct
  misc_feature 1..22: note = chemically synthesized
  source 1..22: mol_type = other DNA
cattaattacctaacctccata

SEQ ID NO: 51933 - DNA, 22 bp, synthetic construct
  misc_feature 1..22: note = chemically synthesized
  source 1..22: mol_type = other DNA
attacctaacctccataagccc

SEQ ID NO: 51934 - DNA, 22 bp, synthetic construct
  misc_feature 1..22: note = chemically synthesized
  source 1..22: mol_type = other DNA
cctaacctccataagcccctac

SEQ ID NO: 51935 - DNA, 22 bp, synthetic construct
  misc_feature 1..22: note = chemically synthesized
  source 1..22: mol_type = other DNA
acctccataagcccctacttta

SEQ ID NO: 51936 - DNA, 22 bp, synthetic construct
  misc_feature 1..22: note = chemically synthesized
  source 1..22: mol_type = other DNA
cataagcccctactttaactgg

SEQ ID NO: 51937 - DNA, 22 bp, synthetic construct
  misc_feature 1..22: note = chemically synthesized
  source 1..22: mol_type = other DNA
ctttaactggggaaccacaata

SEQ ID NO: 51938 - DNA, 22 bp, synthetic construct
  misc_feature 1..22: note = chemically synthesized
  source 1..22: mol_type = other DNA
taactggggaaccacaataacg

SEQ ID NO: 51939 - DNA, 22 bp, synthetic construct
  misc_feature 1..22: note = chemically synthesized
  source 1..22: mol_type = other DNA
aactggggaaccacaataacgt

SEQ ID NO: 51940 - DNA, 22 bp, synthetic construct
  misc_feature 1..22: note = chemically synthesized
  source 1..22: mol_type = other DNA
actggggaaccacaataacgtt

SEQ ID NO: 51941 - DNA, 22 bp, synthetic construct
  misc_feature 1..22: note = chemically synthesized
  source 1..22: mol_type = other DNA
gggaaccacaataacgttttgg

SEQ ID NO: 51942 - DNA, 22 bp, synthetic construct
  misc_feature 1..22: note = chemically synthesized
  source 1..22: mol_type = other DNA
tgggtaccctggaatcaacgtc

SEQ ID NO: 51943 - DNA, 22 bp, synthetic construct
  misc_feature 1..22: note = chemically synthesized
  source 1..22: mol_type = other DNA
gggtaccctggaatcaacgtca

SEQ ID NO: 51944 - DNA, 22 bp, synthetic construct
  misc_feature 1..22: note = chemically synthesized
  source 1..22: mol_type = other DNA
ggtaccctggaatcaacgtcag

SEQ ID NO: 51945 - DNA, 22 bp, synthetic construct
  misc_feature 1..22: note = chemically synthesized
  source 1..22: mol_type = other DNA
gaatcaacgtcagctcagagcc

SEQ ID NO: 51946 - DNA, 22 bp, synthetic construct
  misc_feature 1..22: note = chemically synthesized
  source 1..22: mol_type = other DNA
agagccagtgtccagtactttc

SEQ ID NO: 51947 - DNA, 22 bp, synthetic construct
  misc_feature 1..22: note = chemically synthesized
  source 1..22: mol_type = other DNA
tctgaaatgtctcattacttcc

SEQ ID NO: 51948 - DNA, 22 bp, synthetic construct
  misc_feature 1..22: note = chemically synthesized
  source 1..22: mol_type = other DNA
ctgaaatgtctcattacttccc

SEQ ID NO: 51949 - DNA, 22 bp, synthetic construct
  misc_feature 1..22: note = chemically synthesized
  source 1..22: mol_type = other DNA
tgaaatgtctcattacttccct

SEQ ID NO: 51950 - DNA, 22 bp, synthetic construct
  misc_feature 1..22: note = chemically synthesized
  source 1..22: mol_type = other DNA
aaatgtctcattacttcccttt

SEQ ID NO: 51951 - DNA, 22 bp, synthetic construct
  misc_feature 1..22: note = chemically synthesized
  source 1..22: mol_type = other DNA
attacttccctttctccagtac

SEQ ID NO: 51952 - DNA, 22 bp, synthetic construct
  misc_feature 1..22: note = chemically synthesized
  source 1..22: mol_type = other DNA
cttccctttctccagtacacac

SEQ ID NO: 51953 - DNA, 22 bp, synthetic construct
  misc_feature 1..22: note = chemically synthesized
  source 1..22: mol_type = other DNA
ccctttctccagtacacacagt

SEQ ID NO: 51954 - DNA, 22 bp, synthetic construct
  misc_feature 1..22: note = chemically synthesized
  source 1..22: mol_type = other DNA
cctttctccagtacacacagtt

SEQ ID NO: 51955 - DNA, 22 bp, synthetic construct
  misc_feature 1..22: note = chemically synthesized
  source 1..22: mol_type = other DNA
tctccagtacacacagttaccc

SEQ ID NO: 51956 - DNA, 22 bp, synthetic construct
  misc_feature 1..22: note = chemically synthesized
  source 1..22: mol_type = other DNA
ctccagtacacacagttaccct

SEQ ID NO: 51957 - DNA, 22 bp, synthetic construct
  misc_feature 1..22: note = chemically synthesized
  source 1..22: mol_type = other DNA
tccagtacacacagttaccctg

SEQ ID NO: 51958 - DNA, 22 bp, synthetic construct
  misc_feature 1..22: note = chemically synthesized
  source 1..22: mol_type = other DNA
cagtacacacagttaccctggt

SEQ ID NO: 51959 - DNA, 22 bp, synthetic construct
  misc_feature 1..22: note = chemically synthesized
  source 1..22: mol_type = other DNA
ccctggtaaaaggccagaggtc

SEQ ID NO: 51960 - DNA, 22 bp, synthetic construct
  misc_feature 1..22: note = chemically synthesized
  source 1..22: mol_type = other DNA
gtaaaaggccagaggtctcctt

SEQ ID NO: 51961 - DNA, 22 bp, synthetic construct
  misc_feature 1..22: note = chemically synthesized
  source 1..22: mol_type = other DNA
cttagggaaggatgggagaaag

SEQ ID NO: 51962 - DNA, 22 bp, synthetic construct
  misc_feature 1..22: note = chemically synthesized
  source 1..22: mol_type = other DNA
agggaaggatgggagaaagagt

SEQ ID NO: 51963 - DNA, 22 bp, synthetic construct
  misc_feature 1..22: note = chemically synthesized
  source 1..22: mol_type = other DNA
gggaaggatgggagaaagagta

SEQ ID NO: 51964 - DNA, 22 bp, synthetic construct
  misc_feature 1..22: note = chemically synthesized
  source 1..22: mol_type = other DNA
tcagtagcctagtggtgtcctt

SEQ ID NO: 51965 - DNA, 22 bp, synthetic construct
  misc_feature 1..22: note = chemically synthesized
  source 1..22: mol_type = other DNA
gtggtgtccttcctcaagggga

SEQ ID NO: 51966 - DNA, 22 bp, synthetic construct
  misc_feature 1..22: note = chemically synthesized
  source 1..22: mol_type = other DNA
cctcaaggggatccagcctccc

SEQ ID NO: 51967 - DNA, 22 bp, synthetic construct
  misc_feature 1..22: note = chemically synthesized
  source 1..22: mol_type = other DNA
ctcaaggggatccagcctcccc

SEQ ID NO: 51968 - DNA, 22 bp, synthetic construct
  misc_feature 1..22: note = chemically synthesized
  source 1..22: mol_type = other DNA
aaggggatccagcctccccttc

SEQ ID NO: 51969 - DNA, 22 bp, synthetic construct
  misc_feature 1..22: note = chemically synthesized
  source 1..22: mol_type = other DNA
cccttcattcagtgggttctgg

SEQ ID NO: 51970 - DNA, 22 bp, synthetic construct
  misc_feature 1..22: note = chemically synthesized
  source 1..22: mol_type = other DNA
cattcagtgggttctggaactg

SEQ ID NO: 51971 - DNA, 22 bp, synthetic construct
  misc_feature 1..22: note = chemically synthesized
  source 1..22: mol_type = other DNA
attcagtgggttctggaactgt

SEQ ID NO: 51972 - DNA, 22 bp, synthetic construct
  misc_feature 1..22: note = chemically synthesized
  source 1..22: mol_type = other DNA
agtgggttctggaactgtaaca

SEQ ID NO: 51973 - DNA, 22 bp, synthetic construct
  misc_feature 1..22: note = chemically synthesized
  source 1..22: mol_type = other DNA
tggaactgtaacaggttcgagt

SEQ ID NO: 51974 - DNA, 22 bp, synthetic construct
  misc_feature 1..22: note = chemically synthesized
  source 1..22: mol_type = other DNA
gaactgtaacaggttcgagtct

SEQ ID NO: 51975 - DNA, 22 bp, synthetic construct
  misc_feature 1..22: note = chemically synthesized
  source 1..22: mol_type = other DNA
taacaggttcgagtctggaaat

SEQ ID NO: 51976 - DNA, 22 bp, synthetic construct
  misc_feature 1..22: note = chemically synthesized
  source 1..22: mol_type = other DNA
gagtctggaaattgattgaggg

SEQ ID NO: 51977 - DNA, 22 bp, synthetic construct
  misc_feature 1..22: note = chemically synthesized
  source 1..22: mol_type = other DNA
gaaattgattgagggcccatga

SEQ ID NO: 51978 - DNA, 22 bp, synthetic construct
  misc_feature 1..22: note = chemically synthesized
  source 1..22: mol_type = other DNA
attgagggcccatgattctctg

SEQ ID NO: 51979 - DNA, 22 bp, synthetic construct
  misc_feature 1..22: note = chemically synthesized
  source 1..22: mol_type = other DNA
agggcccatgattctctgtttt

SEQ ID NO: 51980 - DNA, 22 bp, synthetic construct
  misc_feature 1..22: note = chemically synthesized
  source 1..22: mol_type = other DNA
tctgtttttataattcagatta

SEQ ID NO: 51981 - DNA, 22 bp, synthetic construct
  misc_feature 1..22: note = chemically synthesized
  source 1..22: mol_type = other DNA
tgtttttataattcagattagt

SEQ ID NO: 51982 - DNA, 22 bp, synthetic construct
  misc_feature 1..22: note = chemically synthesized
  source 1..22: mol_type = other DNA
tttttataattcagattagtct

SEQ ID NO: 51983 - DNA, 22 bp, synthetic construct
  misc_feature 1..22: note = chemically synthesized
  source 1..22: mol_type = other DNA
ttataattcagattagtcttta

SEQ ID NO: 51984 - DNA, 22 bp, synthetic construct
  misc_feature 1..22: note = chemically synthesized
  source 1..22: mol_type = other DNA
tataattcagattagtctttag

SEQ ID NO: 51985 - DNA, 22 bp, synthetic construct
  misc_feature 1..22: note = chemically synthesized
  source 1..22: mol_type = other DNA
ataattcagattagtctttagt

SEQ ID NO: 51986 - DNA, 22 bp, synthetic construct
  misc_feature 1..22: note = chemically synthesized
  source 1..22: mol_type = other DNA
taattcagattagtctttagtc

SEQ ID NO: 51987 - DNA, 22 bp, synthetic construct
  misc_feature 1..22: note = chemically synthesized
  source 1..22: mol_type = other DNA
agattagtctttagtccattct

SEQ ID NO: 51988 - DNA, 22 bp, synthetic construct
  misc_feature 1..22: note = chemically synthesized
  source 1..22: mol_type = other DNA
gtctttagtccattctacctgg

SEQ ID NO: 51989 - DNA, 22 bp, synthetic construct
  misc_feature 1..22: note = chemically synthesized
  source 1..22: mol_type = other DNA
tagtccattctacctggcagtt

SEQ ID NO: 51990 - DNA, 22 bp, synthetic construct
  misc_feature 1..22: note = chemically synthesized
  source 1..22: mol_type = other DNA
agtccattctacctggcagttt

SEQ ID NO: 51991 - DNA, 22 bp, synthetic construct
  misc_feature 1..22: note = chemically synthesized
  source 1..22: mol_type = other DNA
gtccattctacctggcagtttt

SEQ ID NO: 51992 - DNA, 22 bp, synthetic construct
  misc_feature 1..22: note = chemically synthesized
  source 1..22: mol_type = other DNA
tacctggcagttttttgtttat

SEQ ID NO: 51993 - DNA, 22 bp, synthetic construct
  misc_feature 1..22: note = chemically synthesized
  source 1..22: mol_type = other DNA
cctggcagttttttgtttatat

SEQ ID NO: 51994 - DNA, 22 bp, synthetic construct
  misc_feature 1..22: note = chemically synthesized
  source 1..22: mol_type = other DNA
gcagttttttgtttatataaat

SEQ ID NO: 51995 - DNA, 22 bp, synthetic construct
  misc_feature 1..22: note = chemically synthesized
  source 1..22: mol_type = other DNA
tttgtttatataaatcaagtag

SEQ ID NO: 51996 - DNA, 22 bp, synthetic construct
  misc_feature 1..22: note = chemically synthesized
  source 1..22: mol_type = other DNA
ttgtttatataaatcaagtagg

SEQ ID NO: 51997 - DNA, 22 bp, synthetic construct
  misc_feature 1..22: note = chemically synthesized
  source 1..22: mol_type = other DNA
tgtttatataaatcaagtagga

SEQ ID NO: 51998 - DNA, 22 bp, synthetic construct
  misc_feature 1..22: note = chemically synthesized
  source 1..22: mol_type = other DNA
gtttatataaatcaagtaggaa

SEQ ID NO: 51999 - DNA, 22 bp, synthetic construct
  misc_feature 1..22: note = chemically synthesized
  source 1..22: mol_type = other DNA
tttatataaatcaagtaggaat

SEQ ID NO: 52000 - DNA, 22 bp, synthetic construct
  misc_feature 1..22: note = chemically synthesized
  source 1..22: mol_type = other DNA
atataaatcaagtaggaataca

SEQ ID NO: 52001 - DNA, 22 bp, synthetic construct
  misc_feature 1..22: note = chemically synthesized
  source 1..22: mol_type = other DNA
tataaatcaagtaggaatacag

SEQ ID NO: 52002 - DNA, 22 bp, synthetic construct
  misc_feature 1..22: note = chemically synthesized
  source 1..22: mol_type = other DNA
cccatcaatttcacttctagga

SEQ ID NO: 52003 - DNA, 22 bp, synthetic construct
  misc_feature 1..22: note = chemically synthesized
  source 1..22: mol_type = other DNA
ccatcaatttcacttctaggaa

SEQ ID NO: 52004 - DNA, 22 bp, synthetic construct
  misc_feature 1..22: note = chemically synthesized
  source 1..22: mol_type = other DNA
cacttctaggaacaccatgatt

SEQ ID NO: 52005 - DNA, 22 bp, synthetic construct
  misc_feature 1..22: note = chemically synthesized
  source 1..22: mol_type = other DNA
acttctaggaacaccatgatta

SEQ ID NO: 52006 - DNA, 22 bp, synthetic construct
  misc_feature 1..22: note = chemically synthesized
  source 1..22: mol_type = other DNA
ctaggaacaccatgattaatta

SEQ ID NO: 52007 - DNA, 22 bp, synthetic construct
  misc_feature 1..22: note = chemically synthesized
  source 1..22: mol_type = other DNA
taggaacaccatgattaattag

SEQ ID NO: 52008 - DNA, 22 bp, synthetic construct
  misc_feature 1..22: note = chemically synthesized
  source 1..22: mol_type = other DNA
ggaacaccatgattaattagcc

SEQ ID NO: 52009 - DNA, 22 bp, synthetic construct
  misc_feature 1..22: note = chemically synthesized
  source 1..22: mol_type = other DNA
attagccaatgccagagctcta

SEQ ID NO: 52010 - DNA, 22 bp, synthetic construct
  misc_feature 1..22: note = chemically synthesized
  source 1..22: mol_type = other DNA
gccaatgccagagctctacatg

SEQ ID NO: 52011 - DNA, 22 bp, synthetic construct
  misc_feature 1..22: note = chemically synthesized
  source 1..22: mol_type = other DNA
tacatgagtcagactattctga

SEQ ID NO: 52012 - DNA, 22 bp, synthetic construct
  misc_feature 1..22: note = chemically synthesized
  source 1..22: mol_type = other DNA
catgagtcagactattctgatg

SEQ ID NO: 52013 - DNA, 22 bp, synthetic construct
  misc_feature 1..22: note = chemically synthesized
  source 1..22: mol_type = other DNA
ttctgatggctgctttgcctct

SEQ ID NO: 52014 - DNA, 22 bp, synthetic construct
  misc_feature 1..22: note = chemically synthesized
  source 1..22: mol_type = other DNA
tgatggctgctttgcctctgct

SEQ ID NO: 52015 - DNA, 22 bp, synthetic construct
  misc_feature 1..22: note = chemically synthesized
  source 1..22: mol_type = other DNA
atggctgctttgcctctgctgt

SEQ ID NO: 52016 - DNA, 22 bp, synthetic construct
  misc_feature 1..22: note = chemically synthesized
  source 1..22: mol_type = other DNA
ctttgcctctgctgtctattat

SEQ ID NO: 52017 - DNA, 22 bp, synthetic construct
  misc_feature 1..22: note = chemically synthesized
  source 1..22: mol_type = other DNA
tgcctctgctgtctattatggt

SEQ ID NO: 52018 - DNA, 22 bp, synthetic construct
  misc_feature 1..22: note = chemically synthesized
  source 1..22: mol_type = other DNA
gcctctgctgtctattatggta

SEQ ID NO: 52019 - DNA, 22 bp, synthetic construct
  misc_feature 1..22: note = chemically synthesized
  source 1..22: mol_type = other DNA
cctctgctgtctattatggtag

SEQ ID NO: 52020 - DNA, 22 bp, synthetic construct
  misc_feature 1..22: note = chemically synthesized
  source 1..22: mol_type = other DNA
tgctgtctattatggtagttat

SEQ ID NO: 52021 - DNA, 22 bp, synthetic construct
  misc_feature 1..22: note = chemically synthesized
  source 1..22: mol_type = other DNA
ctgtctattatggtagttatgc

SEQ ID NO: 52022 - DNA, 22 bp, synthetic construct
  misc_feature 1..22: note = chemically synthesized
  source 1..22: mol_type = other DNA
tctattatggtagttatgccca

SEQ ID NO: 52023 - DNA, 22 bp, synthetic construct
  misc_feature 1..22: note = chemically synthesized
  source 1..22: mol_type = other DNA
ttatggtagttatgcccacctt

SEQ ID NO: 52024 - DNA, 22 bp, synthetic construct
  misc_feature 1..22: note = chemically synthesized
  source 1..22: mol_type = other DNA
tggtagttatgcccaccttgcc

SEQ ID NO: 52025 - DNA, 22 bp, synthetic construct
  misc_feature 1..22: note = chemically synthesized
  source 1..22: mol_type = other DNA
tgcccaccttgcctttgatggt

SEQ ID NO: 52026 - DNA, 22 bp, synthetic construct
  misc_feature 1..22: note = chemically synthesized
  source 1..22: mol_type = other DNA
gcctttgatggttcagtgccaa

SEQ ID NO: 52027 - DNA, 22 bp, synthetic construct
  misc_feature 1..22: note = chemically synthesized
  source 1..22: mol_type = other DNA
cctttgatggttcagtgccaac

SEQ ID NO: 52028 - DNA, 22 bp, synthetic construct
  misc_feature 1..22: note = chemically synthesized
  source 1..22: mol_type = other DNA
tgatggttcagtgccaacactt

SEQ ID NO: 52029 - DNA, 22 bp, synthetic construct
  misc_feature 1..22: note = chemically synthesized
  source 1..22: mol_type = other DNA
gatggttcagtgccaacacttg

SEQ ID NO: 52030 - DNA, 22 bp, synthetic construct
  misc_feature 1..22: note = chemically synthesized
  source 1..22: mol_type = other DNA
atggttcagtgccaacacttgg

SEQ ID NO: 52031 - DNA, 22 bp, synthetic construct
  misc_feature 1..22: note = chemically synthesized
  source 1..22: mol_type = other DNA
agtgccaacacttggcccctgc

SEQ ID NO: 52032 - DNA, 22 bp, synthetic construct
  misc_feature 1..22: note = chemically synthesized
  source 1..22: mol_type = other DNA
ggcccctgccacctcaggatcc

SEQ ID NO: 52033 - DNA, 22 bp, synthetic construct
  misc_feature 1..22: note = chemically synthesized
  source 1..22: mol_type = other DNA
gcccctgccacctcaggatcca

SEQ ID NO: 52034 - DNA, 22 bp, synthetic construct
  misc_feature 1..22: note = chemically synthesized
  source 1..22: mol_type = other DNA
ccacctcaggatccaattattc

SEQ ID NO: 52035 - DNA, 22 bp, synthetic construct
  misc_feature 1..22: note = chemically synthesized
  source 1..22: mol_type = other DNA
aggatccaattattcccattgt

SEQ ID NO: 52036 - DNA, 22 bp, synthetic construct
  misc_feature 1..22: note = chemically synthesized
  source 1..22: mol_type = other DNA
ttcccattgtatttaaattttg

SEQ ID NO: 52037 - DNA, 22 bp, synthetic construct
  misc_feature 1..22: note = chemically synthesized
  source 1..22: mol_type = other DNA
ccattgtatttaaattttgtag

SEQ ID NO: 52038 - DNA, 22 bp, synthetic construct
  misc_feature 1..22: note = chemically synthesized
  source 1..22: mol_type = other DNA
tatttaaattttgtagttgagt

SEQ ID NO: 52039 - DNA, 22 bp, synthetic construct
  misc_feature 1..22: note = chemically synthesized
  source 1..22: mol_type = other DNA
aaattttgtagttgagtgactg

SEQ ID NO: 52040 - DNA, 22 bp, synthetic construct
  misc_feature 1..22: note = chemically synthesized
  source 1..22: mol_type = other DNA
aattttgtagttgagtgactgt

SEQ ID NO: 52041 - DNA, 22 bp, synthetic construct
  misc_feature 1..22: note = chemically synthesized
  source 1..22: mol_type = other DNA
tgtagttgagtgactgtggttc

SEQ ID NO: 52042 - DNA, 22 bp, synthetic construct
  misc_feature 1..22: note = chemically synthesized
  source 1..22: mol_type = other DNA
gtagttgagtgactgtggttcc

SEQ ID NO: 52043 - DNA, 22 bp, synthetic construct
  misc_feature 1..22: note = chemically synthesized
  source 1..22: mol_type = other DNA
tagttgagtgactgtggttcct

SEQ ID NO: 52044 - DNA, 22 bp, synthetic construct
  misc_feature 1..22: note = chemically synthesized
  source 1..22: mol_type = other DNA
agtgactgtggttcctactgtt

SEQ ID NO: 52045 - DNA, 22 bp, synthetic construct
  misc_feature 1..22: note = chemically synthesized
  source 1..22: mol_type = other DNA
tggttcctactgttagatctga

SEQ ID NO: 52046 - DNA, 22 bp, synthetic construct
  misc_feature 1..22: note = chemically synthesized
  source 1..22: mol_type = other DNA
ctactgttagatctgacataca

SEQ ID NO: 52047 - DNA, 22 bp, synthetic construct
  misc_feature 1..22: note = chemically synthesized
  source 1..22: mol_type = other DNA
ctgttagatctgacatacagag

SEQ ID NO: 52048 - DNA, 22 bp, synthetic construct
  misc_feature 1..22: note = chemically synthesized
  source 1..22: mol_type = other DNA
ttagatctgacatacagagaag

SEQ ID NO: 52049 - DNA, 22 bp, synthetic construct
  misc_feature 1..22: note = chemically synthesized
  source 1..22: mol_type = other DNA
gatctgacatacagagaagagc

SEQ ID NO: 52050 - DNA, 22 bp, synthetic construct
  misc_feature 1..22: note = chemically synthesized
  source 1..22: mol_type = other DNA
acatacagagaagagcaattac

SEQ ID NO: 52051 - DNA, 22 bp, synthetic construct
  misc_feature 1..22: note = chemically synthesized
  source 1..22: mol_type = other DNA
cgggctcttcaaaaatacaggt

SEQ ID NO: 52052 - DNA, 22 bp, synthetic construct
  misc_feature 1..22: note = chemically synthesized
  source 1..22: mol_type = other DNA
ttcaaaaatacaggtgctgctc

SEQ ID NO: 52053 - DNA, 22 bp, synthetic construct
  misc_feature 1..22: note = chemically synthesized
  source 1..22: mol_type = other DNA
caaaaatacaggtgctgctctc

SEQ ID NO: 52054 - DNA, 22 bp, synthetic construct
  misc_feature 1..22: note = chemically synthesized
  source 1..22: mol_type = other DNA
aaaaatacaggtgctgctctca

SEQ ID NO: 52055 - DNA, 22 bp, synthetic construct
  misc_feature 1..22: note = chemically synthesized
  source 1..22: mol_type = other DNA
ctctcacaaatctatttcacaa

SEQ ID NO: 52056 - DNA, 22 bp, synthetic construct
  misc_feature 1..22: note = chemically synthesized
  source 1..22: mol_type = other DNA
tcacaaatctatttcacaaagc

SEQ ID NO: 52057 - DNA, 22 bp, synthetic construct
  misc_feature 1..22: note = chemically synthesized
  source 1..22: mol_type = other DNA
acaaatctatttcacaaagctt

SEQ ID NO: 52058 - DNA, 22 bp, synthetic construct
  misc_feature 1..22: note = chemically synthesized
  source 1..22: mol_type = other DNA
tttcacaaagcttcggccaagg

SEQ ID NO: 52059 - DNA, 22 bp, synthetic construct
  misc_feature 1..22: note = chemically synthesized
  source 1..22: mol_type = other DNA
cacaaagcttcggccaagggtg

SEQ ID NO: 52060 - DNA, 22 bp, synthetic construct
  misc_feature 1..22: note = chemically synthesized
  source 1..22: mol_type = other DNA
acaaagcttcggccaagggtgt

SEQ ID NO: 52061 - DNA, 22 bp, synthetic construct
  misc_feature 1..22: note = chemically synthesized
  source 1..22: mol_type = other DNA
cggccaagggtgtatcttctgg

SEQ ID NO: 52062 - DNA, 22 bp, synthetic construct
  misc_feature 1..22: note = chemically synthesized
  source 1..22: mol_type = other DNA
ggccaagggtgtatcttctgga

SEQ ID NO: 52063 - DNA, 22 bp, synthetic construct
  misc_feature 1..22: note = chemically synthesized
  source 1..22: mol_type = other DNA
ctggaccctcccagctgggatg

SEQ ID NO: 52064 - DNA, 22 bp, synthetic construct
  misc_feature 1..22: note = chemically synthesized
  source 1..22: mol_type = other DNA
tggaccctcccagctgggatga

SEQ ID NO: 52065 - DNA, 22 bp, synthetic construct
  misc_feature 1..22: note = chemically synthesized
  source 1..22: mol_type = other DNA
gaccctcccagctgggatgagt

SEQ ID NO: 52066 - DNA, 22 bp, synthetic construct
  misc_feature 1..22: note = chemically synthesized
  source 1..22: mol_type = other DNA
ccagctgggatgagtaggtcta

SEQ ID NO: 52067 - DNA, 22 bp, synthetic construct
  misc_feature 1..22: note = chemically synthesized
  source 1..22: mol_type = other DNA
ggatgagtaggtctaaagtgac

SEQ ID NO: 52068 - DNA, 22 bp, synthetic construct
  misc_feature 1..22: note = chemically synthesized
  source 1..22: mol_type = other DNA
aagtgactaatccactccacca

SEQ ID NO: 52069 - DNA, 22 bp, synthetic construct
  misc_feature 1..22: note = chemically synthesized
  source 1..22: mol_type = other DNA
atccactccaccatcctaatct

SEQ ID NO: 52070 - DNA, 22 bp, synthetic construct
  misc_feature 1..22: note = chemically synthesized
  source 1..22: mol_type = other DNA
caccatcctaatctccctaagc

SEQ ID NO: 52071 - DNA, 22 bp, synthetic construct
  misc_feature 1..22: note = chemically synthesized
  source 1..22: mol_type = other DNA
atctccctaagcctttggatca

SEQ ID NO: 52072 - DNA, 22 bp, synthetic construct
  misc_feature 1..22: note = chemically synthesized
  source 1..22: mol_type = other DNA
cctaagcctttggatcacttcc

SEQ ID NO: 52073 - DNA, 22 bp, synthetic construct
  misc_feature 1..22: note = chemically synthesized
  source 1..22: mol_type = other DNA
agcctttggatcacttcctcta

SEQ ID NO: 52074 - DNA, 22 bp, synthetic construct
  misc_feature 1..22: note = chemically synthesized
  source 1..22: mol_type = other DNA
tggatcacttcctctacattaa

SEQ ID NO: 52075 - DNA, 22 bp, synthetic construct
  misc_feature 1..22: note = chemically synthesized
  source 1..22: mol_type = other DNA
ggatcacttcctctacattaaa

SEQ ID NO: 52076 - DNA, 22 bp, synthetic construct
  misc_feature 1..22: note = chemically synthesized
  source 1..22: mol_type = other DNA
gatcacttcctctacattaaac

SEQ ID NO: 52077 - DNA, 22 bp, synthetic construct
  misc_feature 1..22: note = chemically synthesized
  source 1..22: mol_type = other DNA
cctctacattaaaccaaggcat

SEQ ID NO: 52078 - DNA, 22 bp, synthetic construct
  misc_feature 1..22: note = chemically synthesized
  source 1..22: mol_type = other DNA
ctctacattaaaccaaggcatt

SEQ ID NO: 52079 - DNA, 22 bp, synthetic construct
  misc_feature 1..22: note = chemically synthesized
  source 1..22: mol_type = other DNA
tacattaaaccaaggcatttcc

SEQ ID NO: 52080 - DNA, 22 bp, synthetic construct
  misc_feature 1..22: note = chemically synthesized
  source 1..22: mol_type = other DNA
cattaaaccaaggcatttccag

SEQ ID NO: 52081 - DNA, 22 bp, synthetic construct
  misc_feature 1..22: note = chemically synthesized
  source 1..22: mol_type = other DNA
aaccaaggcatttccagctcac

SEQ ID NO: 52082 - DNA, 22 bp, synthetic construct
  misc_feature 1..22: note = chemically synthesized
  source 1..22: mol_type = other DNA
ccagctcactaacattggacca

SEQ ID NO: 52083 - DNA, 22 bp, synthetic construct
  misc_feature 1..22: note = chemically synthesized
  source 1..22: mol_type = other DNA
cagctcactaacattggaccat

SEQ ID NO: 52084 - DNA, 22 bp, synthetic construct
  misc_feature 1..22: note = chemically synthesized
  source 1..22: mol_type = other DNA
actaacattggaccatctttta

SEQ ID NO: 52085 - DNA, 22 bp, synthetic construct
  misc_feature 1..22: note = chemically synthesized
  source 1..22: mol_type = other DNA
acattggaccatcttttaatcc

SEQ ID NO: 52086 - DNA, 22 bp, synthetic construct
  misc_feature 1..22: note = chemically synthesized
  source 1..22: mol_type = other DNA
gaccatcttttaatccatattt

SEQ ID NO: 52087 - DNA, 22 bp, synthetic construct
  misc_feature 1..22: note = chemically synthesized
  source 1..22: mol_type = other DNA
ttaatccatatttcagctaacc

SEQ ID NO: 52088 - DNA, 22 bp, synthetic construct
  misc_feature 1..22: note = chemically synthesized
  source 1..22: mol_type = other DNA
taatccatatttcagctaacca

SEQ ID NO: 52089 - DNA, 22 bp, synthetic construct
  misc_feature 1..22: note = chemically synthesized
  source 1..22: mol_type = other DNA
aatccatatttcagctaaccaa

SEQ ID NO: 52090 - DNA, 22 bp, synthetic construct
  misc_feature 1..22: note = chemically synthesized
  source 1..22: mol_type = other DNA
atccatatttcagctaaccaag

SEQ ID NO: 52091 - DNA, 22 bp, synthetic construct
  misc_feature 1..22: note = chemically synthesized
  source 1..22: mol_type = other DNA
cagctaaccaagcaaataaact

SEQ ID NO: 52092 - DNA, 22 bp, synthetic construct
  misc_feature 1..22: note = chemically synthesized
  source 1..22: mol_type = other DNA
agctaaccaagcaaataaacta

SEQ ID NO: 52093 - DNA, 22 bp, synthetic construct
  misc_feature 1..22: note = chemically synthesized
  source 1..22: mol_type = other DNA
accaagcaaataaactattata

SEQ ID NO: 52094 - DNA, 22 bp, synthetic construct
  misc_feature 1..22: note = chemically synthesized
  source 1..22: mol_type = other DNA
ttataacttttttttttttttt

SEQ ID NO: 52095 - DNA, 22 bp, synthetic construct
  misc_feature 1..22: note = chemically synthesized
  source 1..22: mol_type = other DNA
taactttttttttttttttttt

SEQ ID NO: 52096 - DNA, 22 bp, synthetic construct
  misc_feature 1..22: note = chemically synthesized
  source 1..22: mol_type = other DNA
ttttttttttttttttggaaat

SEQ ID NO: 52097 - DNA, 22 bp, synthetic construct
  misc_feature 1..22: note = chemically synthesized
  source 1..22: mol_type = other DNA
tttttttttttttttggaaatg

SEQ ID NO: 52098 - DNA, 22 bp, synthetic construct
  misc_feature 1..22: note = chemically synthesized
  source 1..22: mol_type = other DNA
ttttttttttttttggaaatgg

SEQ ID NO: 52099 - DNA, 22 bp, synthetic construct
  misc_feature 1..22: note = chemically synthesized
  source 1..22: mol_type = other DNA
tttttttttttttggaaatgga

SEQ ID NO: 52100 - DNA, 22 bp, synthetic construct
  misc_feature 1..22: note = chemically synthesized
  source 1..22: mol_type = other DNA
ttttttttttttggaaatggag

SEQ ID NO: 52101 - DNA, 22 bp, synthetic construct
  misc_feature 1..22: note = chemically synthesized
  source 1..22: mol_type = other DNA
tttttttttttggaaatggagt

SEQ ID NO: 52102 - DNA, 22 bp, synthetic construct
  misc_feature 1..22: note = chemically synthesized
  source 1..22: mol_type = other DNA
ttttttttttggaaatggagtc

SEQ ID NO: 52103 - DNA, 22 bp, synthetic construct
  misc_feature 1..22: note = chemically synthesized
  source 1..22: mol_type = other DNA
tttttttttggaaatggagtct

SEQ ID NO: 52104 - DNA, 22 bp, synthetic construct
  misc_feature 1..22: note = chemically synthesized
  source 1..22: mol_type = other DNA
ttttttttggaaatggagtctt

SEQ ID NO: 52105 - DNA, 22 bp, synthetic construct
  misc_feature 1..22: note = chemically synthesized
  source 1..22: mol_type = other DNA
tttttttggaaatggagtcttg

SEQ ID NO: 52106 - DNA, 22 bp, synthetic construct
  misc_feature 1..22: note = chemically synthesized
  source 1..22: mol_type = other DNA
ttttttggaaatggagtcttgc

SEQ ID NO: 52107 - DNA, 22 bp, synthetic construct
  misc_feature 1..22: note = chemically synthesized
  source 1..22: mol_type = other DNA
tttttggaaatggagtcttgct

SEQ ID NO: 52108 - DNA, 22 bp, synthetic construct
  misc_feature 1..22: note = chemically synthesized
  source 1..22: mol_type = other DNA
ttttggaaatggagtcttgctc

SEQ ID NO: 52109 - DNA, 22 bp, synthetic construct
  misc_feature 1..22: note = chemically synthesized
  source 1..22: mol_type = other DNA
tttggaaatggagtcttgctct

SEQ ID NO: 52110 - DNA, 22 bp, synthetic construct
  misc_feature 1..22: note = chemically synthesized
  source 1..22: mol_type = other DNA
ttggaaatggagtcttgctctg

SEQ ID NO: 52111 - DNA, 22 bp, synthetic construct
  misc_feature 1..22: note = chemically synthesized
  source 1..22: mol_type = other DNA
tggaaatggagtcttgctctgt

SEQ ID NO: 52112 - DNA, 22 bp, synthetic construct
  misc_feature 1..22: note = chemically synthesized
  source 1..22: mol_type = other DNA
ggaaatggagtcttgctctgtt

SEQ ID NO: 52113 - DNA, 22 bp, synthetic construct
  misc_feature 1..22: note = chemically synthesized
  source 1..22: mol_type = other DNA
gaaatggagtcttgctctgtta

SEQ ID NO: 52114 - DNA, 22 bp, synthetic construct
  misc_feature 1..22: note = chemically synthesized
  source 1..22: mol_type = other DNA
gctctgttaccaggctggaatg

SEQ ID NO: 52115 - DNA, 22 bp, synthetic construct
  misc_feature 1..22: note = chemically synthesized
  source 1..22: mol_type = other DNA
ctctgttaccaggctggaatgc

SEQ ID NO: 52116 - DNA, 22 bp, synthetic construct
  misc_feature 1..22: note = chemically synthesized
  source 1..22: mol_type = other DNA
tgttaccaggctggaatgcagt

SEQ ID NO: 52117 - DNA, 22 bp, synthetic construct
  misc_feature 1..22: note = chemically synthesized
  source 1..22: mol_type = other DNA
ttaccaggctggaatgcagtgg

SEQ ID NO: 52118 - DNA, 22 bp, synthetic construct
  misc_feature 1..22: note = chemically synthesized
  source 1..22: mol_type = other DNA
ccaggctggaatgcagtggggc

SEQ ID NO: 52119 - DNA, 22 bp, synthetic construct
  misc_feature 1..22: note = chemically synthesized
  source 1..22: mol_type = other DNA
gaatgcagtggggcgatcttgg

SEQ ID NO: 52120 - DNA, 22 bp, synthetic construct
  misc_feature 1..22: note = chemically synthesized
  source 1..22: mol_type = other DNA
ggctcactgcaatctctgcctc

SEQ ID NO: 52121 - DNA, 22 bp, synthetic construct
  misc_feature 1..22: note = chemically synthesized
  source 1..22: mol_type = other DNA
gctcactgcaatctctgcctca

SEQ ID NO: 52122 - DNA, 22 bp, synthetic construct
  misc_feature 1..22: note = chemically synthesized
  source 1..22: mol_type = other DNA
actgcaatctctgcctcacagg

SEQ ID NO: 52123 - DNA, 22 bp, synthetic construct
  misc_feature 1..22: note = chemically synthesized
  source 1..22: mol_type = other DNA
caatctctgcctcacaggttca

SEQ ID NO: 52124 - DNA, 22 bp, synthetic construct
  misc_feature 1..22: note = chemically synthesized
  source 1..22: mol_type = other DNA
tgcctcacaggttcaagcagtt

SEQ ID NO: 52125 - DNA, 22 bp, synthetic construct
  misc_feature 1..22: note = chemically synthesized
  source 1..22: mol_type = other DNA
cctcacaggttcaagcagttct

SEQ ID NO: 52126 - DNA, 22 bp, synthetic construct
  misc_feature 1..22: note = chemically synthesized
  source 1..22: mol_type = other DNA
acaggttcaagcagttctcttg

SEQ ID NO: 52127 - DNA, 22 bp, synthetic construct
  misc_feature 1..22: note = chemically synthesized
  source 1..22: mol_type = other DNA
aagcagttctcttgcctcagcc

SEQ ID NO: 52128 - DNA, 22 bp, synthetic construct
  misc_feature 1..22: note = chemically synthesized
  source 1..22: mol_type = other DNA
tcttgcctcagcctcccaagta

SEQ ID NO: 52129 - DNA, 22 bp, synthetic construct
  misc_feature 1..22: note = chemically synthesized
  source 1..22: mol_type = other DNA
ttgcctcagcctcccaagtaga

SEQ ID NO: 52130 - DNA, 22 bp, synthetic construct
  misc_feature 1..22: note = chemically synthesized
  source 1..22: mol_type = other DNA
gcctcagcctcccaagtagatg

SEQ ID NO: 52131 - DNA, 22 bp, synthetic construct
  misc_feature 1..22: note = chemically synthesized
  source 1..22: mol_type = other DNA
cctcagcctcccaagtagatga

SEQ ID NO: 52132 - DNA, 22 bp, synthetic construct
  misc_feature 1..22: note = chemically synthesized
  source 1..22: mol_type = other DNA
agcctcccaagtagatgagatt

SEQ ID NO: 52133 - DNA, 22 bp, synthetic construct
  misc_feature 1..22: note = chemically synthesized
  source 1..22: mol_type = other DNA
ccaagtagatgagattacagtt

SEQ ID NO: 52134 - DNA, 22 bp, synthetic construct
  misc_feature 1..22: note = chemically synthesized
  source 1..22: mol_type = other DNA
cagttacgcatcaccatgccca

SEQ ID NO: 52135 - DNA, 22 bp, synthetic construct
  misc_feature 1..22: note = chemically synthesized
  source 1..22: mol_type = other DNA
cgcatcaccatgcccagctaat

SEQ ID NO: 52136 - DNA, 22 bp, synthetic construct
  misc_feature 1..22: note = chemically synthesized
  source 1..22: mol_type = other DNA
atttttgtatttttagcagaga

SEQ ID NO: 52137 - DNA, 22 bp, synthetic construct
  misc_feature 1..22: note = chemically synthesized
  source 1..22: mol_type = other DNA
ttgtatttttagcagagatggg

SEQ ID NO: 52138 - DNA, 22 bp, synthetic construct
  misc_feature 1..22: note = chemically synthesized
  source 1..22: mol_type = other DNA
tgtatttttagcagagatgggg

SEQ ID NO: 52139 - DNA, 22 bp, synthetic construct
  misc_feature 1..22: note = chemically synthesized
  source 1..22: mol_type = other DNA
gtatttttagcagagatggggt

SEQ ID NO: 52140 - DNA, 22 bp, synthetic construct
  misc_feature 1..22: note = chemically synthesized
  source 1..22: mol_type = other DNA
tatttttagcagagatggggtt

SEQ ID NO: 52141 - DNA, 22 bp, synthetic construct
  misc_feature 1..22: note = chemically synthesized
  source 1..22: mol_type = other DNA
ttagcagagatggggtttcacc

SEQ ID NO: 52142 - DNA, 22 bp, synthetic construct
  misc_feature 1..22: note = chemically synthesized
  source 1..22: mol_type = other DNA
tagcagagatggggtttcacca

SEQ ID NO: 52143 - DNA, 22 bp, synthetic construct
  misc_feature 1..22: note = chemically synthesized
  source 1..22: mol_type = other DNA
agcagagatggggtttcaccat

SEQ ID NO: 52144 - DNA, 22 bp, synthetic construct
  misc_feature 1..22: note = chemically synthesized
  source 1..22: mol_type = other DNA
gcagagatggggtttcaccatt

SEQ ID NO: 52145 - DNA, 22 bp, synthetic construct
  misc_feature 1..22: note = chemically synthesized
  source 1..22: mol_type = other DNA
caccattttagccagaattgtc

SEQ ID NO: 52146 - DNA, 22 bp, synthetic construct
  misc_feature 1..22: note = chemically synthesized
  source 1..22: mol_type = other DNA
accattttagccagaattgtct

SEQ ID NO: 52147 - DNA, 22 bp, synthetic construct
  misc_feature 1..22: note = chemically synthesized
  source 1..22: mol_type = other DNA
tagccagaattgtctcaatctc

SEQ ID NO: 52148 - DNA, 22 bp, synthetic construct
  misc_feature 1..22: note = chemically synthesized
  source 1..22: mol_type = other DNA
agccagaattgtctcaatctcc

SEQ ID NO: 52149 - DNA, 22 bp, synthetic construct
  misc_feature 1..22: note = chemically synthesized
  source 1..22: mol_type = other DNA
gccagaattgtctcaatctcct

SEQ ID NO: 52150 - DNA, 22 bp, synthetic construct
  misc_feature 1..22: note = chemically synthesized
  source 1..22: mol_type = other DNA
tctcaatctcctgatctcgtga

SEQ ID NO: 52151 - DNA, 22 bp, synthetic construct
  misc_feature 1..22: note = chemically synthesized
  source 1..22: mol_type = other DNA
aatctcctgatctcgtgatctg

SEQ ID NO: 52152 - DNA, 22 bp, synthetic construct
  misc_feature 1..22: note = chemically synthesized
  source 1..22: mol_type = other DNA
ctgatctcgtgatctgcccgcc

SEQ ID NO: 52153 - DNA, 22 bp, synthetic construct
  misc_feature 1..22: note = chemically synthesized
  source 1..22: mol_type = other DNA
atctcgtgatctgcccgccccc

SEQ ID NO: 52154 - DNA, 22 bp, synthetic construct
  misc_feature 1..22: note = chemically synthesized
  source 1..22: mol_type = other DNA
gtgatctgcccgcccccgcctc

SEQ ID NO: 52155 - DNA, 22 bp, synthetic construct
  misc_feature 1..22: note = chemically synthesized
  source 1..22: mol_type = other DNA
cccgcccccgcctcccaaggtg

SEQ ID NO: 52156 - DNA, 22 bp, synthetic construct
  misc_feature 1..22: note = chemically synthesized
  source 1..22: mol_type = other DNA
ccaaggtgctgggattacaggc

SEQ ID NO: 52157 - DNA, 22 bp, synthetic construct
  misc_feature 1..22: note = chemically synthesized
  source 1..22: mol_type = other DNA
ggattacaggcgtgagccactg

SEQ ID NO: 52158 - DNA, 22 bp, synthetic construct
  misc_feature 1..22: note = chemically synthesized
  source 1..22: mol_type = other DNA
caggcgtgagccactgctcccg

SEQ ID NO: 52159 - DNA, 22 bp, synthetic construct
  misc_feature 1..22: note = chemically synthesized
  source 1..22: mol_type = other DNA
ctcccggccctatcagaacctt

SEQ ID NO: 52160 - DNA, 22 bp, synthetic construct
  misc_feature 1..22: note = chemically synthesized
  source 1..22: mol_type = other DNA
ccggccctatcagaaccttttc

SEQ ID NO: 52161 - DNA, 22 bp, synthetic construct
  misc_feature 1..22: note = chemically synthesized
  source 1..22: mol_type = other DNA
tcagaaccttttctaagtcccc

SEQ ID NO: 52162 - DNA, 22 bp, synthetic construct
  misc_feature 1..22: note = chemically synthesized
  source 1..22: mol_type = other DNA
ttctaagtccccgagctgcaac

SEQ ID NO: 52163 - DNA, 22 bp, synthetic construct
  misc_feature 1..22: note = chemically synthesized
  source 1..22: mol_type = other DNA
tctaagtccccgagctgcaaca

SEQ ID NO: 52164 - DNA, 22 bp, synthetic construct
  misc_feature 1..22: note = chemically synthesized
  source 1..22: mol_type = other DNA
ctaagtccccgagctgcaacat

SEQ ID NO: 52165 - DNA, 22 bp, synthetic construct
  misc_feature 1..22: note = chemically synthesized
  source 1..22: mol_type = other DNA
taagtccccgagctgcaacatt

SEQ ID NO: 52166 - DNA, 22 bp, synthetic construct
  misc_feature 1..22: note = chemically synthesized
  source 1..22: mol_type = other DNA
agtccccgagctgcaacattaa

SEQ ID NO: 52167 - DNA, 22 bp, synthetic construct
  misc_feature 1..22: note = chemically synthesized
  source 1..22: mol_type = other DNA
caacattaaatgcagaatccct

SEQ ID NO: 52168 - DNA, 22 bp, synthetic construct
  misc_feature 1..22: note = chemically synthesized
  source 1..22: mol_type = other DNA
aatgcagaatccctacttagta

SEQ ID NO: 52169 - DNA, 22 bp, synthetic construct
  misc_feature 1..22: note = chemically synthesized
  source 1..22: mol_type = other DNA
cttagtagggccaaaccaataa

SEQ ID NO: 52170 - DNA, 22 bp, synthetic construct
  misc_feature 1..22: note = chemically synthesized
  source 1..22: mol_type = other DNA
agtagggccaaaccaataaatt

SEQ ID NO: 52171 - DNA, 22 bp, synthetic construct
  misc_feature 1..22: note = chemically synthesized
  source 1..22: mol_type = other DNA
gtagggccaaaccaataaattc

SEQ ID NO: 52172 - DNA, 22 bp, synthetic construct
  misc_feature 1..22: note = chemically synthesized
  source 1..22: mol_type = other DNA
agcttgatccaactctatgtcc

SEQ ID NO: 52173 - DNA, 22 bp, synthetic construct
  misc_feature 1..22: note = chemically synthesized
  source 1..22: mol_type = other DNA
gatccaactctatgtcccttcc

SEQ ID NO: 52174 - DNA, 22 bp, synthetic construct
  misc_feature 1..22: note = chemically synthesized
  source 1..22: mol_type = other DNA
atccaactctatgtcccttcca

SEQ ID NO: 52175 - DNA, 22 bp, synthetic construct
  misc_feature 1..22: note = chemically synthesized
  source 1..22: mol_type = other DNA
tatgtcccttccaccattatcc

SEQ ID NO: 52176 - DNA, 22 bp, synthetic construct
  misc_feature 1..22: note = chemically synthesized
  source 1..22: mol_type = other DNA
tgtcccttccaccattatccct

SEQ ID NO: 52177 - DNA, 22 bp, synthetic construct
  misc_feature 1..22: note = chemically synthesized
  source 1..22: mol_type = other DNA
ccaccattatcccttaccctta

SEQ ID NO: 52178 - DNA, 22 bp, synthetic construct
  misc_feature 1..22: note = chemically synthesized
  source 1..22: mol_type = other DNA
caccattatcccttacccttaa

SEQ ID NO: 52179 - DNA, 22 bp, synthetic construct
  misc_feature 1..22: note = chemically synthesized
  source 1..22: mol_type = other DNA
tcccttacccttaatatccatt

SEQ ID NO: 52180 - DNA, 22 bp, synthetic construct
  misc_feature 1..22: note = chemically synthesized
  source 1..22: mol_type = other DNA
acccttaatatccattcccatg

SEQ ID NO: 52181 - DNA, 22 bp, synthetic construct
  misc_feature 1..22: note = chemically synthesized
  source 1..22: mol_type = other DNA
cccttaatatccattcccatgc

SEQ ID NO: 52182 - DNA, 22 bp, synthetic construct
  misc_feature 1..22: note = chemically synthesized
  source 1..22: mol_type = other DNA
aatatccattcccatgcctgtt

SEQ ID NO: 52183 - DNA, 22 bp, synthetic construct
  misc_feature 1..22: note = chemically synthesized
  source 1..22: mol_type = other DNA
atatccattcccatgcctgttc

SEQ ID NO: 52184 - DNA, 22 bp, synthetic construct
  misc_feature 1..22: note = chemically synthesized
  source 1..22: mol_type = other DNA
ccatgcctgttctccagatttc

SEQ ID NO: 52185 - DNA, 22 bp, synthetic construct
  misc_feature 1..22: note = chemically synthesized
  source 1..22: mol_type = other DNA
ttctccagatttctgccaatat

SEQ ID NO: 52186 - DNA, 22 bp, synthetic construct
  misc_feature 1..22: note = chemically synthesized
  source 1..22: mol_type = other DNA
tccagatttctgccaatataaa

SEQ ID NO: 52187 - DNA, 22 bp, synthetic construct
  misc_feature 1..22: note = chemically synthesized
  source 1..22: mol_type = other DNA
cagatttctgccaatataaatt

SEQ ID NO: 52188 - DNA, 22 bp, synthetic construct
  misc_feature 1..22: note = chemically synthesized
  source 1..22: mol_type = other DNA
ctgccaatataaattagaaagc

SEQ ID NO: 52189 - DNA, 22 bp, synthetic construct
  misc_feature 1..22: note = chemically synthesized
  source 1..22: mol_type = other DNA
tgccaatataaattagaaagct

SEQ ID NO: 52190 - DNA, 22 bp, synthetic construct
  misc_feature 1..22: note = chemically synthesized
  source 1..22: mol_type = other DNA
ccaatataaattagaaagctta

SEQ ID NO: 52191 - DNA, 22 bp, synthetic construct
  misc_feature 1..22: note = chemically synthesized
  source 1..22: mol_type = other DNA
gaaagcttaagcagttctttta

SEQ ID NO: 52192 - DNA, 22 bp, synthetic construct
  misc_feature 1..22: note = chemically synthesized
  source 1..22: mol_type = other DNA
aagcagttcttttagagtataa

SEQ ID NO: 52193 - DNA, 22 bp, synthetic construct
  misc_feature 1..22: note = chemically synthesized
  source 1..22: mol_type = other DNA
agcagttcttttagagtataat

SEQ ID NO: 52194 - DNA, 22 bp, synthetic construct
  misc_feature 1..22: note = chemically synthesized
  source 1..22: mol_type = other DNA
ttttagagtataatgcacctcc

SEQ ID NO: 52195 - DNA, 22 bp, synthetic construct
  misc_feature 1..22: note = chemically synthesized
  source 1..22: mol_type = other DNA
ttagagtataatgcacctcctc

SEQ ID NO: 52196 - DNA, 22 bp, synthetic construct
  misc_feature 1..22: note = chemically synthesized
  source 1..22: mol_type = other DNA
tagagtataatgcacctcctca

SEQ ID NO: 52197 - DNA, 22 bp, synthetic construct
  misc_feature 1..22: note = chemically synthesized
  source 1..22: mol_type = other DNA
agagtataatgcacctcctcat

SEQ ID NO: 52198 - DNA, 22 bp, synthetic construct
  misc_feature 1..22: note = chemically synthesized
  source 1..22: mol_type = other DNA
gagtataatgcacctcctcatg

SEQ ID NO: 52199 - DNA, 22 bp, synthetic construct
  misc_feature 1..22: note = chemically synthesized
  source 1..22: mol_type = other DNA
ctcatgggtcacactctgaacc

SEQ ID NO: 52200 - DNA, 22 bp, synthetic construct
  misc_feature 1..22: note = chemically synthesized
  source 1..22: mol_type = other DNA
atgggtcacactctgaacctca

SEQ ID NO: 52201 - DNA, 22 bp, synthetic construct
  misc_feature 1..22: note = chemically synthesized
  source 1..22: mol_type = other DNA
tgaacctcacctctggggcccg

SEQ ID NO: 52202 - DNA, 22 bp, synthetic construct
  misc_feature 1..22: note = chemically synthesized
  source 1..22: mol_type = other DNA
aacctcacctctggggcccgca

SEQ ID NO: 52203 - DNA, 22 bp, synthetic construct
  misc_feature 1..22: note = chemically synthesized
  source 1..22: mol_type = other DNA
acctctggggcccgcaaggaat

SEQ ID NO: 52204 - DNA, 22 bp, synthetic construct
  misc_feature 1..22: note = chemically synthesized
  source 1..22: mol_type = other DNA
tggggcccgcaaggaatttagc

SEQ ID NO: 52205 - DNA, 22 bp, synthetic construct
  misc_feature 1..22: note = chemically synthesized
  source 1..22: mol_type = other DNA
gggcccgcaaggaatttagcct

SEQ ID NO: 52206 - DNA, 22 bp, synthetic construct
  misc_feature 1..22: note = chemically synthesized
  source 1..22: mol_type = other DNA
agcctagttataggtctagaag

SEQ ID NO: 52207 - DNA, 22 bp, synthetic construct
  misc_feature 1..22: note = chemically synthesized
  source 1..22: mol_type = other DNA
gcctagttataggtctagaagc

SEQ ID NO: 52208 - DNA, 22 bp, synthetic construct
  misc_feature 1..22: note = chemically synthesized
  source 1..22: mol_type = other DNA
gttataggtctagaagcattca

SEQ ID NO: 52209 - DNA, 22 bp, synthetic construct
  misc_feature 1..22: note = chemically synthesized
  source 1..22: mol_type = other DNA
taggtctagaagcattcagggg

SEQ ID NO: 52210 - DNA, 22 bp, synthetic construct
  misc_feature 1..22: note = chemically synthesized
  source 1..22: mol_type = other DNA
gaagcattcaggggcattaggg

SEQ ID NO: 52211 - DNA, 22 bp, synthetic construct
  misc_feature 1..22: note = chemically synthesized
  source 1..22: mol_type = other DNA
aggggcattaggggtgcctctt

SEQ ID NO: 52212 - DNA, 22 bp, synthetic construct
  misc_feature 1..22: note = chemically synthesized
  source 1..22: mol_type = other DNA
ggggtgcctcttgaggagaatc

SEQ ID NO: 52213 - DNA, 22 bp, synthetic construct
  misc_feature 1..22: note = chemically synthesized
  source 1..22: mol_type = other DNA
ttgaggagaatcaacattatct

SEQ ID NO: 52214 - DNA, 22 bp, synthetic construct
  misc_feature 1..22: note = chemically synthesized
  source 1..22: mol_type = other DNA
gaggagaatcaacattatcttg

SEQ ID NO: 52215 - DNA, 22 bp, synthetic construct
  misc_feature 1..22: note = chemically synthesized
  source 1..22: mol_type = other DNA
aggagaatcaacattatcttgc

SEQ ID NO: 52216 - DNA, 22 bp, synthetic construct
  misc_feature 1..22: note = chemically synthesized
  source 1..22: mol_type = other DNA
tcttgcctggcagctgcctcag

SEQ ID NO: 52217 - DNA, 22 bp, synthetic construct
  misc_feature 1..22: note = chemically synthesized
  source 1..22: mol_type = other DNA
gcctggcagctgcctcagggaa

SEQ ID NO: 52218 - DNA, 22 bp, synthetic construct
  misc_feature 1..22: note = chemically synthesized
  source 1..22: mol_type = other DNA
cctggcagctgcctcagggaag

SEQ ID NO: 52219 - DNA, 22 bp, synthetic construct
  misc_feature 1..22: note = chemically synthesized
  source 1..22: mol_type = other DNA
gcagctgcctcagggaaggcca

SEQ ID NO: 52220 - DNA, 22 bp, synthetic construct
  misc_feature 1..22: note = chemically synthesized
  source 1..22: mol_type = other DNA
cctcagggaaggccatcactgt

SEQ ID NO: 52221 - DNA, 22 bp, synthetic construct
  misc_feature 1..22: note = chemically synthesized
  source 1..22: mol_type = other DNA
agggaaggccatcactgttgcc

SEQ ID NO: 52222 - DNA, 22 bp, synthetic construct
  misc_feature 1..22: note = chemically synthesized
  source 1..22: mol_type = other DNA
ttgcctcaagcagtgcagggtt

SEQ ID NO: 52223 - DNA, 22 bp, synthetic construct
  misc_feature 1..22: note = chemically synthesized
  source 1..22: mol_type = other DNA
cctcaagcagtgcagggtttac

SEQ ID NO: 52224 - DNA, 22 bp, synthetic construct
  misc_feature 1..22: note = chemically synthesized
  source 1..22: mol_type = other DNA
aagcagtgcagggtttacatcc

SEQ ID NO: 52225 - DNA, 22 bp, synthetic construct
  misc_feature 1..22: note = chemically synthesized
  source 1..22: mol_type = other DNA
acatcctcagacaaaggtggaa

SEQ ID NO: 52226 - DNA, 22 bp, synthetic construct
  misc_feature 1..22: note = chemically synthesized
  source 1..22: mol_type = other DNA
catcctcagacaaaggtggaaa

SEQ ID NO: 52227 - DNA, 22 bp, synthetic construct
  misc_feature 1..22: note = chemically synthesized
  source 1..22: mol_type = other DNA
agacaaaggtggaaaggctaat

SEQ ID NO: 52228 - DNA, 22 bp, synthetic construct
  misc_feature 1..22: note = chemically synthesized
  source 1..22: mol_type = other DNA
atggcagcacgggtcagggagg

SEQ ID NO: 52229 - DNA, 22 bp, synthetic construct
  misc_feature 1..22: note = chemically synthesized
  source 1..22: mol_type = other DNA
ccactactggggatggggaaac

SEQ ID NO: 52230 - DNA, 22 bp, synthetic construct
  misc_feature 1..22: note = chemically synthesized
  source 1..22: mol_type = other DNA
ctggggatggggaaactgtttc

SEQ ID NO: 52231 - DNA, 22 bp, synthetic construct
  misc_feature 1..22: note = chemically synthesized
  source 1..22: mol_type = other DNA
gggatggggaaactgtttcttc

SEQ ID NO: 52232 - DNA, 22 bp, synthetic construct
  misc_feature 1..22: note = chemically synthesized
  source 1..22: mol_type = other DNA
tttcttctggcaaaaaagtttc

SEQ ID NO: 52233 - DNA, 22 bp, synthetic construct
  misc_feature 1..22: note = chemically synthesized
  source 1..22: mol_type = other DNA
cttctggcaaaaaagtttcatc

SEQ ID NO: 52234 - DNA, 22 bp, synthetic construct
  misc_feature 1..22: note = chemically synthesized
  source 1..22: mol_type = other DNA
ttctggcaaaaaagtttcatca

SEQ ID NO: 52235 - DNA, 22 bp, synthetic construct
  misc_feature 1..22: note = chemically synthesized
  source 1..22: mol_type = other DNA
ctggcaaaaaagtttcatcaga

SEQ ID NO: 52236 - DNA, 22 bp, synthetic construct
  misc_feature 1..22: note = chemically synthesized
  source 1..22: mol_type = other DNA
tggcaaaaaagtttcatcagag

SEQ ID NO: 52237 - DNA, 22 bp, synthetic construct
  misc_feature 1..22: note = chemically synthesized
  source 1..22: mol_type = other DNA
gcaaaaaagtttcatcagagtt

SEQ ID NO: 52238 - DNA, 22 bp, synthetic construct
  misc_feature 1..22: note = chemically synthesized
  source 1..22: mol_type = other DNA
catcagagttcacaaactcagt

SEQ ID NO: 52239 - DNA, 22 bp, synthetic construct
  misc_feature 1..22: note = chemically synthesized
  source 1..22: mol_type = other DNA
atcagagttcacaaactcagtg

SEQ ID NO: 52240 - DNA, 22 bp, synthetic construct
  misc_feature 1..22: note = chemically synthesized
  source 1..22: mol_type = other DNA
acaaactcagtgtcctcagctt

SEQ ID NO: 52241 - DNA, 22 bp, synthetic construct
  misc_feature 1..22: note = chemically synthesized
  source 1..22: mol_type = other DNA
agtgtcctcagcttcatcaggg

SEQ ID NO: 52242 - DNA, 22 bp, synthetic construct
  misc_feature 1..22: note = chemically synthesized
  source 1..22: mol_type = other DNA
agcttcatcagggttctcccac

SEQ ID NO: 52243 - DNA, 22 bp, synthetic construct
  misc_feature 1..22: note = chemically synthesized
  source 1..22: mol_type = other DNA
catcagggttctcccacacatc

SEQ ID NO: 52244 - DNA, 22 bp, synthetic construct
  misc_feature 1..22: note = chemically synthesized
  source 1..22: mol_type = other DNA
atcagggttctcccacacatcc

SEQ ID NO: 52245 - DNA, 22 bp, synthetic construct
  misc_feature 1..22: note = chemically synthesized
  source 1..22: mol_type = other DNA
tcccacacatccccactccaag

SEQ ID NO: 52246 - DNA, 22 bp, synthetic construct
  misc_feature 1..22: note = chemically synthesized
  source 1..22: mol_type = other DNA
ccacacatccccactccaagtt

SEQ ID NO: 52247 - DNA, 22 bp, synthetic construct
  misc_feature 1..22: note = chemically synthesized
  source 1..22: mol_type = other DNA
caagttccagggtcccattttt

SEQ ID NO: 52248 - DNA, 22 bp, synthetic construct
  misc_feature 1..22: note = chemically synthesized
  source 1..22: mol_type = other DNA
cagggtcccatttttttccagt

SEQ ID NO: 52249 - DNA, 22 bp, synthetic construct
  misc_feature 1..22: note = chemically synthesized
  source 1..22: mol_type = other DNA
ttttccagtcaatgccctcact

SEQ ID NO: 52250 - DNA, 22 bp, synthetic construct
  misc_feature 1..22: note = chemically synthesized
  source 1..22: mol_type = other DNA
tttccagtcaatgccctcactt

SEQ ID NO: 52251 - DNA, 22 bp, synthetic construct
  misc_feature 1..22: note = chemically synthesized
  source 1..22: mol_type = other DNA
ttccagtcaatgccctcacttt

SEQ ID NO: 52252 - DNA, 22 bp, synthetic construct
  misc_feature 1..22: note = chemically synthesized
  source 1..22: mol_type = other DNA
tccagtcaatgccctcacttta

SEQ ID NO: 52253 - DNA, 22 bp, synthetic construct
  misc_feature 1..22: note = chemically synthesized
  source 1..22: mol_type = other DNA
ccagtcaatgccctcactttaa

SEQ ID NO: 52254 - DNA, 22 bp, synthetic construct
  misc_feature 1..22: note = chemically synthesized
  source 1..22: mol_type = other DNA
cagtcaatgccctcactttaac

SEQ ID NO: 52255 - DNA, 22 bp, synthetic construct
  misc_feature 1..22: note = chemically synthesized
  source 1..22: mol_type = other DNA
actttaacagtaaacacctggc

SEQ ID NO: 52256 - DNA, 22 bp, synthetic construct
  misc_feature 1..22: note = chemically synthesized
  source 1..22: mol_type = other DNA
taacagtaaacacctggcaagg

SEQ ID NO: 52257 - DNA, 22 bp, synthetic construct
  misc_feature 1..22: note = chemically synthesized
  source 1..22: mol_type = other DNA
aacagtaaacacctggcaaggc

SEQ ID NO: 52258 - DNA, 22 bp, synthetic construct
  misc_feature 1..22: note = chemically synthesized
  source 1..22: mol_type = other DNA
acagtaaacacctggcaaggct

SEQ ID NO: 52259 - DNA, 22 bp, synthetic construct
  misc_feature 1..22: note = chemically synthesized
  source 1..22: mol_type = other DNA
gcaaggctgtgcatgcacctct

SEQ ID NO: 52260 - DNA, 22 bp, synthetic construct
  misc_feature 1..22: note = chemically synthesized
  source 1..22: mol_type = other DNA
tgcatgcacctcttgttgcaga

SEQ ID NO: 52261 - DNA, 22 bp, synthetic construct
  misc_feature 1..22: note = chemically synthesized
  source 1..22: mol_type = other DNA
ttgttgcagatcagctactcgc

SEQ ID NO: 52262 - DNA, 22 bp, synthetic construct
  misc_feature 1..22: note = chemically synthesized
  source 1..22: mol_type = other DNA
gttgcagatcagctactcgcat

SEQ ID NO: 52263 - DNA, 22 bp, synthetic construct
  misc_feature 1..22: note = chemically synthesized
  source 1..22: mol_type = other DNA
ttgcagatcagctactcgcatg

SEQ ID NO: 52264 - DNA, 22 bp, synthetic construct
  misc_feature 1..22: note = chemically synthesized
  source 1..22: mol_type = other DNA
cagatcagctactcgcatgata

SEQ ID NO: 52265 - DNA, 22 bp, synthetic construct
  misc_feature 1..22: note = chemically synthesized
  source 1..22: mol_type = other DNA
ctcgcatgataacagcttgtct

SEQ ID NO: 52266 - DNA, 22 bp, synthetic construct
  misc_feature 1..22: note = chemically synthesized
  source 1..22: mol_type = other DNA
gcatgataacagcttgtctctg

SEQ ID NO: 52267 - DNA, 22 bp, synthetic construct
  misc_feature 1..22: note = chemically synthesized
  source 1..22: mol_type = other DNA
gtctctgttttttcacaatttc

SEQ ID NO: 52268 - DNA, 22 bp, synthetic construct
  misc_feature 1..22: note = chemically synthesized
  source 1..22: mol_type = other DNA
tctctgttttttcacaatttca

SEQ ID NO: 52269 - DNA, 22 bp, synthetic construct
  misc_feature 1..22: note = chemically synthesized
  source 1..22: mol_type = other DNA
tgttttttcacaatttcaactc

SEQ ID NO: 52270 - DNA, 22 bp, synthetic construct
  misc_feature 1..22: note = chemically synthesized
  source 1..22: mol_type = other DNA
ttttttcacaatttcaactctt

SEQ ID NO: 52271 - DNA, 22 bp, synthetic construct
  misc_feature 1..22: note = chemically synthesized
  source 1..22: mol_type = other DNA
tttcacaatttcaactctttct

SEQ ID NO: 52272 - DNA, 22 bp, synthetic construct
  misc_feature 1..22: note = chemically synthesized
  source 1..22: mol_type = other DNA
ttcacaatttcaactctttctc

SEQ ID NO: 52273 - DNA, 22 bp, synthetic construct
  misc_feature 1..22: note = chemically synthesized
  source 1..22: mol_type = other DNA
tcacaatttcaactctttctct

SEQ ID NO: 52274 - DNA, 22 bp, synthetic construct
  misc_feature 1..22: note = chemically synthesized
  source 1..22: mol_type = other DNA
cacaatttcaactctttctcta

SEQ ID NO: 52275 - DNA, 22 bp, synthetic construct
  misc_feature 1..22: note = chemically synthesized
  source 1..22: mol_type = other DNA
acaatttcaactctttctctac

SEQ ID NO: 52276 - DNA, 22 bp, synthetic construct
  misc_feature 1..22: note = chemically synthesized
  source 1..22: mol_type = other DNA
caactctttctctacaggagtt

SEQ ID NO: 52277 - DNA, 22 bp, synthetic construct
  misc_feature 1..22: note = chemically synthesized
  source 1..22: mol_type = other DNA
aactctttctctacaggagtta

SEQ ID NO: 52278 - DNA, 22 bp, synthetic construct
  misc_feature 1..22: note = chemically synthesized
  source 1..22: mol_type = other DNA
tttctctacaggagttaaaact

SEQ ID NO: 52279 - DNA, 22 bp, synthetic construct
  misc_feature 1..22: note = chemically synthesized
  source 1..22: mol_type = other DNA
tctctacaggagttaaaactct

SEQ ID NO: 52280 - DNA, 22 bp, synthetic construct
  misc_feature 1..22: note = chemically synthesized
  source 1..22: mol_type = other DNA
ctctacaggagttaaaactctc

SEQ ID NO: 52281 - DNA, 22 bp, synthetic construct
  misc_feature 1..22: note = chemically synthesized
  source 1..22: mol_type = other DNA
tctacaggagttaaaactctca

SEQ ID NO: 52282 - DNA, 22 bp, synthetic construct
  misc_feature 1..22: note = chemically synthesized
  source 1..22: mol_type = other DNA
tacaggagttaaaactctcatt

SEQ ID NO: 52283 - DNA, 22 bp, synthetic construct
  misc_feature 1..22: note = chemically synthesized
  source 1..22: mol_type = other DNA
caggagttaaaactctcattca

SEQ ID NO: 52284 - DNA, 22 bp, synthetic construct
  misc_feature 1..22: note = chemically synthesized
  source 1..22: mol_type = other DNA
aaactctcattcagggcaatct

SEQ ID NO: 52285 - DNA, 22 bp, synthetic construct
  misc_feature 1..22: note = chemically synthesized
  source 1..22: mol_type = other DNA
tcattcagggcaatcttagcag

SEQ ID NO: 52286 - DNA, 22 bp, synthetic construct
  misc_feature 1..22: note = chemically synthesized
  source 1..22: mol_type = other DNA
attcagggcaatcttagcagat

SEQ ID NO: 52287 - DNA, 22 bp, synthetic construct
  misc_feature 1..22: note = chemically synthesized
  source 1..22: mol_type = other DNA
agggcaatcttagcagatttgt

SEQ ID NO: 52288 - DNA, 22 bp, synthetic construct
  misc_feature 1..22: note = chemically synthesized
  source 1..22: mol_type = other DNA
agcagatttgtggctcagtatc

SEQ ID NO: 52289 - DNA, 22 bp, synthetic construct
  misc_feature 1..22: note = chemically synthesized
  source 1..22: mol_type = other DNA
gcagatttgtggctcagtatct

SEQ ID NO: 52290 - DNA, 22 bp, synthetic construct
  misc_feature 1..22: note = chemically synthesized
  source 1..22: mol_type = other DNA
gtggctcagtatctgcttctga

SEQ ID NO: 52291 - DNA, 22 bp, synthetic construct
  misc_feature 1..22: note = chemically synthesized
  source 1..22: mol_type = other DNA
tggctcagtatctgcttctgaa

SEQ ID NO: 52292 - DNA, 22 bp, synthetic construct
  misc_feature 1..22: note = chemically synthesized
  source 1..22: mol_type = other DNA
agtatctgcttctgaaggtggg

SEQ ID NO: 52293 - DNA, 22 bp, synthetic construct
  misc_feature 1..22: note = chemically synthesized
  source 1..22: mol_type = other DNA
cttctgaaggtgggagacagat

SEQ ID NO: 52294 - DNA, 22 bp, synthetic construct
  misc_feature 1..22: note = chemically synthesized
  source 1..22: mol_type = other DNA
ctgaaggtgggagacagatccc

SEQ ID NO: 52295 - DNA, 22 bp, synthetic construct
  misc_feature 1..22: note = chemically synthesized
  source 1..22: mol_type = other DNA
tgaaggtgggagacagatcccc

SEQ ID NO: 52296 - DNA, 22 bp, synthetic construct
  misc_feature 1..22: note = chemically synthesized
  source 1..22: mol_type = other DNA
aaggtgggagacagatcccctg

SEQ ID NO: 52297 - DNA, 22 bp, synthetic construct
  misc_feature 1..22: note = chemically synthesized
  source 1..22: mol_type = other DNA
agatcatcattttctttcatct

SEQ ID NO: 52298 - DNA, 22 bp, synthetic construct
  misc_feature 1..22: note = chemically synthesized
  source 1..22: mol_type = other DNA
tctttcatctctttctccagag

SEQ ID NO: 52299 - DNA, 22 bp, synthetic construct
  misc_feature 1..22: note = chemically synthesized
  source 1..22: mol_type = other DNA
ctttcatctctttctccagaga

SEQ ID NO: 52300 - DNA, 22 bp, synthetic construct
  misc_feature 1..22: note = chemically synthesized
  source 1..22: mol_type = other DNA
tttcatctctttctccagagaa

SEQ ID NO: 52301 - DNA, 22 bp, synthetic construct
  misc_feature 1..22: note = chemically synthesized
  source 1..22: mol_type = other DNA
tcatctctttctccagagaact

SEQ ID NO: 52302 - DNA, 22 bp, synthetic construct
  misc_feature 1..22: note = chemically synthesized
  source 1..22: mol_type = other DNA
catctctttctccagagaactt

SEQ ID NO: 52303 - DNA, 22 bp, synthetic construct
  misc_feature 1..22: note = chemically synthesized
  source 1..22: mol_type = other DNA
atctctttctccagagaactta

SEQ ID NO: 52304 - DNA, 22 bp, synthetic construct
  misc_feature 1..22: note = chemically synthesized
  source 1..22: mol_type = other DNA
tttctccagagaacttaggagc

SEQ ID NO: 52305 - DNA, 22 bp, synthetic construct
  misc_feature 1..22: note = chemically synthesized
  source 1..22: mol_type = other DNA
tctccagagaacttaggagcaa

SEQ ID NO: 52306 - DNA, 22 bp, synthetic construct
  misc_feature 1..22: note = chemically synthesized
  source 1..22: mol_type = other DNA
ctccagagaacttaggagcaat

SEQ ID NO: 52307 - DNA, 22 bp, synthetic construct
  misc_feature 1..22: note = chemically synthesized
  source 1..22: mol_type = other DNA
tccagagaacttaggagcaatc

SEQ ID NO: 52308 - DNA, 22 bp, synthetic construct
  misc_feature 1..22: note = chemically synthesized
  source 1..22: mol_type = other DNA
cagagaacttaggagcaatcaa

SEQ ID NO: 52309 - DNA, 22 bp, synthetic construct
  misc_feature 1..22: note = chemically synthesized
  source 1..22: mol_type = other DNA
aggagcaatcaaccaacttcat

SEQ ID NO: 52310 - DNA, 22 bp, synthetic construct
  misc_feature 1..22: note = chemically synthesized
  source 1..22: mol_type = other DNA
ggagcaatcaaccaacttcatt

SEQ ID NO: 52311 - DNA, 22 bp, synthetic construct
  misc_feature 1..22: note = chemically synthesized
  source 1..22: mol_type = other DNA
cattatgttccttggttctcca

SEQ ID NO: 52312 - DNA, 22 bp, synthetic construct
  misc_feature 1..22: note = chemically synthesized
  source 1..22: mol_type = other DNA
attatgttccttggttctccac

SEQ ID NO: 52313 - DNA, 22 bp, synthetic construct
  misc_feature 1..22: note = chemically synthesized
  source 1..22: mol_type = other DNA
tgttccttggttctccacatat

SEQ ID NO: 52314 - DNA, 22 bp, synthetic construct
  misc_feature 1..22: note = chemically synthesized
  source 1..22: mol_type = other DNA
cttggttctccacatatagtca

SEQ ID NO: 52315 - DNA, 22 bp, synthetic construct
  misc_feature 1..22: note = chemically synthesized
  source 1..22: mol_type = other DNA
ggttctccacatatagtcaaag

SEQ ID NO: 52316 - DNA, 22 bp, synthetic construct
  misc_feature 1..22: note = chemically synthesized
  source 1..22: mol_type = other DNA
gttctccacatatagtcaaagg

SEQ ID NO: 52317 - DNA, 22 bp, synthetic construct
  misc_feature 1..22: note = chemically synthesized
  source 1..22: mol_type = other DNA
tccacatatagtcaaaggtatt

SEQ ID NO: 52318 - DNA, 22 bp, synthetic construct
  misc_feature 1..22: note = chemically synthesized
  source 1..22: mol_type = other DNA
cacatatagtcaaaggtattat

SEQ ID NO: 52319 - DNA, 22 bp, synthetic construct
  misc_feature 1..22: note = chemically synthesized
  source 1..22: mol_type = other DNA
tgtatagagtcactaaactcct

SEQ ID NO: 52320 - DNA, 22 bp, synthetic construct
  misc_feature 1..22: note = chemically synthesized
  source 1..22: mol_type = other DNA
aactccttgcctctcataagtg

SEQ ID NO: 52321 - DNA, 22 bp, synthetic construct
  misc_feature 1..22: note = chemically synthesized
  source 1..22: mol_type = other DNA
cttgcctctcataagtgatgaa

SEQ ID NO: 52322 - DNA, 22 bp, synthetic construct
  misc_feature 1..22: note = chemically synthesized
  source 1..22: mol_type = other DNA
gcctctcataagtgatgaatca

SEQ ID NO: 52323 - DNA, 22 bp, synthetic construct
  misc_feature 1..22: note = chemically synthesized
  source 1..22: mol_type = other DNA
cctctcataagtgatgaatcag

SEQ ID NO: 52324 - DNA, 22 bp, synthetic construct
  misc_feature 1..22: note = chemically synthesized
  source 1..22: mol_type = other DNA
tcataagtgatgaatcagtagt

SEQ ID NO: 52325 - DNA, 22 bp, synthetic construct
  misc_feature 1..22: note = chemically synthesized
  source 1..22: mol_type = other DNA
ataagtgatgaatcagtagtgt

SEQ ID NO: 52326 - DNA, 22 bp, synthetic construct
  misc_feature 1..22: note = chemically synthesized
  source 1..22: mol_type = other DNA
attttgcataactctctaaaca

SEQ ID NO: 52327 - DNA, 22 bp, synthetic construct
  misc_feature 1..22: note = chemically synthesized
  source 1..22: mol_type = other DNA
ttttgcataactctctaaacaa

SEQ ID NO: 52328 - DNA, 22 bp, synthetic construct
  misc_feature 1..22: note = chemically synthesized
  source 1..22: mol_type = other DNA
tgcataactctctaaacaattc

SEQ ID NO: 52329 - DNA, 22 bp, synthetic construct
  misc_feature 1..22: note = chemically synthesized
  source 1..22: mol_type = other DNA
gcataactctctaaacaattca

SEQ ID NO: 52330 - DNA, 22 bp, synthetic construct
  misc_feature 1..22: note = chemically synthesized
  source 1..22: mol_type = other DNA
cataactctctaaacaattcag

SEQ ID NO: 52331 - DNA, 22 bp, synthetic construct
  misc_feature 1..22: note = chemically synthesized
  source 1..22: mol_type = other DNA
tctaaacaattcaggccaagta

SEQ ID NO: 52332 - DNA, 22 bp, synthetic construct
  misc_feature 1..22: note = chemically synthesized
  source 1..22: mol_type = other DNA
taaacaattcaggccaagtact

SEQ ID NO: 52333 - DNA, 22 bp, synthetic construct
  misc_feature 1..22: note = chemically synthesized
  source 1..22: mol_type = other DNA
aacaattcaggccaagtactat

SEQ ID NO: 52334 - DNA, 22 bp, synthetic construct
  misc_feature 1..22: note = chemically synthesized
  source 1..22: mol_type = other DNA
aggccaagtactatcagtgttc

SEQ ID NO: 52335 - DNA, 22 bp, synthetic construct
  misc_feature 1..22: note = chemically synthesized
  source 1..22: mol_type = other DNA
tcagtgttctccatactattag

SEQ ID NO: 52336 - DNA, 22 bp, synthetic construct
  misc_feature 1..22: note = chemically synthesized
  source 1..22: mol_type = other DNA
tccatactattagaagtagagt

SEQ ID NO: 52337 - DNA, 22 bp, synthetic construct
  misc_feature 1..22: note = chemically synthesized
  source 1..22: mol_type = other DNA
catactattagaagtagagtcc

SEQ ID NO: 52338 - DNA, 22 bp, synthetic construct
  misc_feature 1..22: note = chemically synthesized
  source 1..22: mol_type = other DNA
ttagaagtagagtccttagcat

SEQ ID NO: 52339 - DNA, 22 bp, synthetic construct
  misc_feature 1..22: note = chemically synthesized
  source 1..22: mol_type = other DNA
gaagtagagtccttagcatttt

SEQ ID NO: 52340 - DNA, 22 bp, synthetic construct
  misc_feature 1..22: note = chemically synthesized
  source 1..22: mol_type = other DNA
agcattttttggtctaatcata

SEQ ID NO: 52341 - DNA, 22 bp, synthetic construct
  misc_feature 1..22: note = chemically synthesized
  source 1..22: mol_type = other DNA
gcattttttggtctaatcatat

SEQ ID NO: 52342 - DNA, 22 bp, synthetic construct
  misc_feature 1..22: note = chemically synthesized
  source 1..22: mol_type = other DNA
tttggtctaatcatattaatca

SEQ ID NO: 52343 - DNA, 22 bp, synthetic construct
  misc_feature 1..22: note = chemically synthesized
  source 1..22: mol_type = other DNA
ttggtctaatcatattaatcag

SEQ ID NO: 52344 - DNA, 22 bp, synthetic construct
  misc_feature 1..22: note = chemically synthesized
  source 1..22: mol_type = other DNA
tggtctaatcatattaatcagc

SEQ ID NO: 52345 - DNA, 22 bp, synthetic construct
  misc_feature 1..22: note = chemically synthesized
  source 1..22: mol_type = other DNA
ggtctaatcatattaatcagcc

SEQ ID NO: 52346 - DNA, 22 bp, synthetic construct
  misc_feature 1..22: note = chemically synthesized
  source 1..22: mol_type = other DNA
gtctaatcatattaatcagcca

SEQ ID NO: 52347 - DNA, 22 bp, synthetic construct
  misc_feature 1..22: note = chemically synthesized
  source 1..22: mol_type = other DNA
atcatattaatcagccaacacc

SEQ ID NO: 52348 - DNA, 22 bp, synthetic construct
  misc_feature 1..22: note = chemically synthesized
  source 1..22: mol_type = other DNA
atcagccaacaccagaagtccc

SEQ ID NO: 52349 - DNA, 22 bp, synthetic construct
  misc_feature 1..22: note = chemically synthesized
  source 1..22: mol_type = other DNA
catccttaatattctgttcctc

SEQ ID NO: 52350 - DNA, 22 bp, synthetic construct
  misc_feature 1..22: note = chemically synthesized
  source 1..22: mol_type = other DNA
aatattctgttcctcaagaacc

SEQ ID NO: 52351 - DNA, 22 bp, synthetic construct
  misc_feature 1..22: note = chemically synthesized
  source 1..22: mol_type = other DNA
atattctgttcctcaagaacca

SEQ ID NO: 52352 - DNA, 22 bp, synthetic construct
  misc_feature 1..22: note = chemically synthesized
  source 1..22: mol_type = other DNA
tgttcctcaagaaccacttctg

SEQ ID NO: 52353 - DNA, 22 bp, synthetic construct
  misc_feature 1..22: note = chemically synthesized
  source 1..22: mol_type = other DNA
ttcctcaagaaccacttctggt

SEQ ID NO: 52354 - DNA, 22 bp, synthetic construct
  misc_feature 1..22: note = chemically synthesized
  source 1..22: mol_type = other DNA
ctcaagaaccacttctggtatg

SEQ ID NO: 52355 - DNA, 22 bp, synthetic construct
  misc_feature 1..22: note = chemically synthesized
  source 1..22: mol_type = other DNA
aagaaccacttctggtatgaaa

SEQ ID NO: 52356 - DNA, 22 bp, synthetic construct
  misc_feature 1..22: note = chemically synthesized
  source 1..22: mol_type = other DNA
ctggtatgaaaatctgtattag

SEQ ID NO: 52357 - DNA, 22 bp, synthetic construct
  misc_feature 1..22: note = chemically synthesized
  source 1..22: mol_type = other DNA
tggtatgaaaatctgtattagt

SEQ ID NO: 52358 - DNA, 22 bp, synthetic construct
  misc_feature 1..22: note = chemically synthesized
  source 1..22: mol_type = other DNA
gtatgaaaatctgtattagtcg

SEQ ID NO: 52359 - DNA, 22 bp, synthetic construct
  misc_feature 1..22: note = chemically synthesized
  source 1..22: mol_type = other DNA
tattagtcggggttctctagag

SEQ ID NO: 52360 - DNA, 22 bp, synthetic construct
  misc_feature 1..22: note = chemically synthesized
  source 1..22: mol_type = other DNA
gtcggggttctctagagggaca

SEQ ID NO: 52361 - DNA, 22 bp, synthetic construct
  misc_feature 1..22: note = chemically synthesized
  source 1..22: mol_type = other DNA
tctagagggacagaactaatag

SEQ ID NO: 52362 - DNA, 22 bp, synthetic construct
  misc_feature 1..22: note = chemically synthesized
  source 1..22: mol_type = other DNA
tagagggacagaactaatagga

SEQ ID NO: 52363 - DNA, 22 bp, synthetic construct
  misc_feature 1..22: note = chemically synthesized
  source 1..22: mol_type = other DNA
gagggacagaactaataggaga

SEQ ID NO: 52364 - DNA, 22 bp, synthetic construct
  misc_feature 1..22: note = chemically synthesized
  source 1..22: mol_type = other DNA
ataggagattatatatatatat

SEQ ID NO: 52365 - DNA, 22 bp, synthetic construct
  misc_feature 1..22: note = chemically synthesized
  source 1..22: mol_type = other DNA
tatatatatatatatgagagag

SEQ ID NO: 52366 - DNA, 22 bp, synthetic construct
  misc_feature 1..22: note = chemically synthesized
  source 1..22: mol_type = other DNA
tatctatctatagatatagata

SEQ ID NO: 52367 - DNA, 22 bp, synthetic construct
  misc_feature 1..22: note = chemically synthesized
  source 1..22: mol_type = other DNA
tctatagatatagatatactca

SEQ ID NO: 52368 - DNA, 22 bp, synthetic construct
  misc_feature 1..22: note = chemically synthesized
  source 1..22: mol_type = other DNA
tagatatagatatactcacaca

SEQ ID NO: 52369 - DNA, 22 bp, synthetic construct
  misc_feature 1..22: note = chemically synthesized
  source 1..22: mol_type = other DNA
acacaaaggggagcttattaag

SEQ ID NO: 52370 - DNA, 22 bp, synthetic construct
  misc_feature 1..22: note = chemically synthesized
  source 1..22: mol_type = other DNA
attaagtggtattaactcacaa

SEQ ID NO: 52371 - DNA, 22 bp, synthetic construct
  misc_feature 1..22: note = chemically synthesized
  source 1..22: mol_type = other DNA
ttaagtggtattaactcacaag

SEQ ID NO: 52372 - DNA, 22 bp, synthetic construct
  misc_feature 1..22: note = chemically synthesized
  source 1..22: mol_type = other DNA
agtggtattaactcacaagatt

SEQ ID NO: 52373 - DNA, 22 bp, synthetic construct
  misc_feature 1..22: note = chemically synthesized
  source 1..22: mol_type = other DNA
actcacaagattacaaggtccc

SEQ ID NO: 52374 - DNA, 22 bp, synthetic construct
  misc_feature 1..22: note = chemically synthesized
  source 1..22: mol_type = other DNA
acaagattacaaggtcccataa

SEQ ID NO: 52375 - DNA, 22 bp, synthetic construct
  misc_feature 1..22: note = chemically synthesized
  source 1..22: mol_type = other DNA
caaggtcccataataggccacc

SEQ ID NO: 52376 - DNA, 22 bp, synthetic construct
  misc_feature 1..22: note = chemically synthesized
  source 1..22: mol_type = other DNA
caatctgaggagcaaggaagac

SEQ ID NO: 52377 - DNA, 22 bp, synthetic construct
  misc_feature 1..22: note = chemically synthesized
  source 1..22: mol_type = other DNA
aggagcaaggaagacagtccaa

SEQ ID NO: 52378 - DNA, 22 bp, synthetic construct
  misc_feature 1..22: note = chemically synthesized
  source 1..22: mol_type = other DNA
aagaacttggagtccgatgttc

SEQ ID NO: 52379 - DNA, 22 bp, synthetic construct
  misc_feature 1..22: note = chemically synthesized
  source 1..22: mol_type = other DNA
ggagtccgatgttcaagagcag

SEQ ID NO: 52380 - DNA, 22 bp, synthetic construct
  misc_feature 1..22: note = chemically synthesized
  source 1..22: mol_type = other DNA
gagtccgatgttcaagagcagg

SEQ ID NO: 52381 - DNA, 22 bp, synthetic construct
  misc_feature 1..22: note = chemically synthesized
  source 1..22: mol_type = other DNA
aagagcaggaaggatccagcac

SEQ ID NO: 52382 - DNA, 22 bp, synthetic construct
  misc_feature 1..22: note = chemically synthesized
  source 1..22: mol_type = other DNA
ggaggctaagccagtctagcct

SEQ ID NO: 52383 - DNA, 22 bp, synthetic construct
  misc_feature 1..22: note = chemically synthesized
  source 1..22: mol_type = other DNA
agccagtctagcctttttacat

SEQ ID NO: 52384 - DNA, 22 bp, synthetic construct
  misc_feature 1..22: note = chemically synthesized
  source 1..22: mol_type = other DNA
gcctttttacatttttctgcca

SEQ ID NO: 52385 - DNA, 22 bp, synthetic construct
  misc_feature 1..22: note = chemically synthesized
  source 1..22: mol_type = other DNA
tttacatttttctgccagcttt

SEQ ID NO: 52386 - DNA, 22 bp, synthetic construct
  misc_feature 1..22: note = chemically synthesized
  source 1..22: mol_type = other DNA
ttacatttttctgccagcttta

SEQ ID NO: 52387 - DNA, 22 bp, synthetic construct
  misc_feature 1..22: note = chemically synthesized
  source 1..22: mol_type = other DNA
tacatttttctgccagctttat

SEQ ID NO: 52388 - DNA, 22 bp, synthetic construct
  misc_feature 1..22: note = chemically synthesized
  source 1..22: mol_type = other DNA
acatttttctgccagctttata

SEQ ID NO: 52389 - DNA, 22 bp, synthetic construct
  misc_feature 1..22: note = chemically synthesized
  source 1..22: mol_type = other DNA
catttttctgccagctttatat

SEQ ID NO: 52390 - DNA, 22 bp, synthetic construct
  misc_feature 1..22: note = chemically synthesized
  source 1..22: mol_type = other DNA
ttctgccagctttatattctgg

SEQ ID NO: 52391 - DNA, 22 bp, synthetic construct
  misc_feature 1..22: note = chemically synthesized
  source 1..22: mol_type = other DNA
tctgccagctttatattctggc

SEQ ID NO: 52392 - DNA, 22 bp, synthetic construct
  misc_feature 1..22: note = chemically synthesized
  source 1..22: mol_type = other DNA
ctgccagctttatattctggct

SEQ ID NO: 52393 - DNA, 22 bp, synthetic construct
  misc_feature 1..22: note = chemically synthesized
  source 1..22: mol_type = other DNA
tgccagctttatattctggctc

SEQ ID NO: 52394 - DNA, 22 bp, synthetic construct
  misc_feature 1..22: note = chemically synthesized
  source 1..22: mol_type = other DNA
ccagctttatattctggctcta

SEQ ID NO: 52395 - DNA, 22 bp, synthetic construct
  misc_feature 1..22: note = chemically synthesized
  source 1..22: mol_type = other DNA
tatattctggctctacagcttg

SEQ ID NO: 52396 - DNA, 22 bp, synthetic construct
  misc_feature 1..22: note = chemically synthesized
  source 1..22: mol_type = other DNA
atattctggctctacagcttgg

SEQ ID NO: 52397 - DNA, 22 bp, synthetic construct
  misc_feature 1..22: note = chemically synthesized
  source 1..22: mol_type = other DNA
tattctggctctacagcttggg

SEQ ID NO: 52398 - DNA, 22 bp, synthetic construct
  misc_feature 1..22: note = chemically synthesized
  source 1..22: mol_type = other DNA
tggctctacagcttgggggcag

SEQ ID NO: 52399 - DNA, 22 bp, synthetic construct
  misc_feature 1..22: note = chemically synthesized
  source 1..22: mol_type = other DNA
gctctacagcttgggggcagca

SEQ ID NO: 52400 - DNA, 22 bp, synthetic construct
  misc_feature 1..22: note = chemically synthesized
  source 1..22: mol_type = other DNA
tacagcttgggggcagcagggg

SEQ ID NO: 52401 - DNA, 22 bp, synthetic construct
  misc_feature 1..22: note = chemically synthesized
  source 1..22: mol_type = other DNA
cagcttgggggcagcaggggca

SEQ ID NO: 52402 - DNA, 22 bp, synthetic construct
  misc_feature 1..22: note = chemically synthesized
  source 1..22: mol_type = other DNA
gggggcagcaggggcaggggcc

SEQ ID NO: 52403 - DNA, 22 bp, synthetic construct
  misc_feature 1..22: note = chemically synthesized
  source 1..22: mol_type = other DNA
ggggcagcaggggcaggggcct

SEQ ID NO: 52404 - DNA, 22 bp, synthetic construct
  misc_feature 1..22: note = chemically synthesized
  source 1..22: mol_type = other DNA
agggtgcttgcagggatgacac

SEQ ID NO: 52405 - DNA, 22 bp, synthetic construct
  misc_feature 1..22: note = chemically synthesized
  source 1..22: mol_type = other DNA
gcagggatgacacactggcctc

SEQ ID NO: 52406 - DNA, 22 bp, synthetic construct
  misc_feature 1..22: note = chemically synthesized
  source 1..22: mol_type = other DNA
cagggatgacacactggcctct

SEQ ID NO: 52407 - DNA, 22 bp, synthetic construct
  misc_feature 1..22: note = chemically synthesized
  source 1..22: mol_type = other DNA
gcctcttttccatagggtggct

SEQ ID NO: 52408 - DNA, 22 bp, synthetic construct
  misc_feature 1..22: note = chemically synthesized
  source 1..22: mol_type = other DNA
ttttccatagggtggctggggc

SEQ ID NO: 52409 - DNA, 22 bp, synthetic construct
  misc_feature 1..22: note = chemically synthesized
  source 1..22: mol_type = other DNA
ttccatagggtggctggggcac

SEQ ID NO: 52410 - DNA, 22 bp, synthetic construct
  misc_feature 1..22: note = chemically synthesized
  source 1..22: mol_type = other DNA
tccatagggtggctggggcaca

SEQ ID NO: 52411 - DNA, 22 bp, synthetic construct
  misc_feature 1..22: note = chemically synthesized
  source 1..22: mol_type = other DNA
ccatagggtggctggggcacac

SEQ ID NO: 52412 - DNA, 22 bp, synthetic construct
  misc_feature 1..22: note = chemically synthesized
  source 1..22: mol_type = other DNA
catagggtggctggggcacact

SEQ ID NO: 52413 - DNA, 22 bp, synthetic construct
  misc_feature 1..22: note = chemically synthesized
  source 1..22: mol_type = other DNA
gggcacactggggtgtgagtaa

SEQ ID NO: 52414 - DNA, 22 bp, synthetic construct
  misc_feature 1..22: note = chemically synthesized
  source 1..22: mol_type = other DNA
gggtgtgagtaaagcactcagg

SEQ ID NO: 52415 - DNA, 22 bp, synthetic construct
  misc_feature 1..22: note = chemically synthesized
  source 1..22: mol_type = other DNA
aggatcttttttccttccctag

SEQ ID NO: 52416 - DNA, 22 bp, synthetic construct
  misc_feature 1..22: note = chemically synthesized
  source 1..22: mol_type = other DNA
ttttccttccctagtccaagta

SEQ ID NO: 52417 - DNA, 22 bp, synthetic construct
  misc_feature 1..22: note = chemically synthesized
  source 1..22: mol_type = other DNA
tttccttccctagtccaagtac

SEQ ID NO: 52418 - DNA, 22 bp, synthetic construct
  misc_feature 1..22: note = chemically synthesized
  source 1..22: mol_type = other DNA
ttccttccctagtccaagtaca

SEQ ID NO: 52419 - DNA, 22 bp, synthetic construct
  misc_feature 1..22: note = chemically synthesized
  source 1..22: mol_type = other DNA
tccttccctagtccaagtacag

SEQ ID NO: 52420 - DNA, 22 bp, synthetic construct
  misc_feature 1..22: note = chemically synthesized
  source 1..22: mol_type = other DNA
ccttccctagtccaagtacagc

SEQ ID NO: 52421 - DNA, 22 bp, synthetic construct
  misc_feature 1..22: note = chemically synthesized
  source 1..22: mol_type = other DNA
cttccctagtccaagtacagca

SEQ ID NO: 52422 - DNA, 22 bp, synthetic construct
  misc_feature 1..22: note = chemically synthesized
  source 1..22: mol_type = other DNA
ccctagtccaagtacagcaagg

SEQ ID NO: 52423 - DNA, 22 bp, synthetic construct
  misc_feature 1..22: note = chemically synthesized
  source 1..22: mol_type = other DNA
cctagtccaagtacagcaaggg

SEQ ID NO: 52424 - DNA, 22 bp, synthetic construct
  misc_feature 1..22: note = chemically synthesized
  source 1..22: mol_type = other DNA
gtccaagtacagcaagggcagt

SEQ ID NO: 52425 - DNA, 22 bp, synthetic construct
  misc_feature 1..22: note = chemically synthesized
  source 1..22: mol_type = other DNA
cagtgttagtggcagaaggact

SEQ ID NO: 52426 - DNA, 22 bp, synthetic construct
  misc_feature 1..22: note = chemically synthesized
  source 1..22: mol_type = other DNA
gtggcagaaggactttcagtca

SEQ ID NO: 52427 - DNA, 22 bp, synthetic construct
  misc_feature 1..22: note = chemically synthesized
  source 1..22: mol_type = other DNA
tcagtcacctctgggagcttca

SEQ ID NO: 52428 - DNA, 22 bp, synthetic construct
  misc_feature 1..22: note = chemically synthesized
  source 1..22: mol_type = other DNA
cagtcacctctgggagcttcac

SEQ ID NO: 52429 - DNA, 22 bp, synthetic construct
  misc_feature 1..22: note = chemically synthesized
  source 1..22: mol_type = other DNA
agtcacctctgggagcttcacc

SEQ ID NO: 52430 - DNA, 22 bp, synthetic construct
  misc_feature 1..22: note = chemically synthesized
  source 1..22: mol_type = other DNA
tgggagcttcaccccacaaaaa

SEQ ID NO: 52431 - DNA, 22 bp, synthetic construct
  misc_feature 1..22: note = chemically synthesized
  source 1..22: mol_type = other DNA
ggagcttcaccccacaaaaaca

SEQ ID NO: 52432 - DNA, 22 bp, synthetic construct
  misc_feature 1..22: note = chemically synthesized
  source 1..22: mol_type = other DNA
caccccacaaaaacacagagtg

SEQ ID NO: 52433 - DNA, 22 bp, synthetic construct
  misc_feature 1..22: note = chemically synthesized
  source 1..22: mol_type = other DNA
accccacaaaaacacagagtgc

SEQ ID NO: 52434 - DNA, 22 bp, synthetic construct
  misc_feature 1..22: note = chemically synthesized
  source 1..22: mol_type = other DNA
aactgagttcgaggtgcctgca

SEQ ID NO: 52435 - DNA, 22 bp, synthetic construct
  misc_feature 1..22: note = chemically synthesized
  source 1..22: mol_type = other DNA
agttcgaggtgcctgcactgtg

SEQ ID NO: 52436 - DNA, 22 bp, synthetic construct
  misc_feature 1..22: note = chemically synthesized
  source 1..22: mol_type = other DNA
gaggtgcctgcactgtgggccc

SEQ ID NO: 52437 - DNA, 22 bp, synthetic construct
  misc_feature 1..22: note = chemically synthesized
  source 1..22: mol_type = other DNA
cactgtgggcccaagccaggag

SEQ ID NO: 52438 - DNA, 22 bp, synthetic construct
  misc_feature 1..22: note = chemically synthesized
  source 1..22: mol_type = other DNA
tgggcccaagccaggagccttg

SEQ ID NO: 52439 - DNA, 22 bp, synthetic construct
  misc_feature 1..22: note = chemically synthesized
  source 1..22: mol_type = other DNA
gcctggtgaagagtagcaggtg

SEQ ID NO: 52440 - DNA, 22 bp, synthetic construct
  misc_feature 1..22: note = chemically synthesized
  source 1..22: mol_type = other DNA
cctggtgaagagtagcaggtga

SEQ ID NO: 52441 - DNA, 22 bp, synthetic construct
  misc_feature 1..22: note = chemically synthesized
  source 1..22: mol_type = other DNA
gtgaagagtagcaggtgaaagc

SEQ ID NO: 52442 - DNA, 22 bp, synthetic construct
  misc_feature 1..22: note = chemically synthesized
  source 1..22: mol_type = other DNA
acaagaaagagaaactggaatt

SEQ ID NO: 52443 - DNA, 22 bp, synthetic construct
  misc_feature 1..22: note = chemically synthesized
  source 1..22: mol_type = other DNA
gaattctttccctgctgtgtgc

SEQ ID NO: 52444 - DNA, 22 bp, synthetic construct
  misc_feature 1..22: note = chemically synthesized
  source 1..22: mol_type = other DNA
tttccctgctgtgtgctggagg

SEQ ID NO: 52445 - DNA, 22 bp, synthetic construct
  misc_feature 1..22: note = chemically synthesized
  source 1..22: mol_type = other DNA
tccctgctgtgtgctggaggtg

SEQ ID NO: 52446 - DNA, 22 bp, synthetic construct
  misc_feature 1..22: note = chemically synthesized
  source 1..22: mol_type = other DNA
ccctgctgtgtgctggaggtgt

SEQ ID NO: 52447 - DNA, 22 bp, synthetic construct
  misc_feature 1..22: note = chemically synthesized
  source 1..22: mol_type = other DNA
cctgctgtgtgctggaggtgtc

SEQ ID NO: 52448 - DNA, 22 bp, synthetic construct
  misc_feature 1..22: note = chemically synthesized
  source 1..22: mol_type = other DNA
ctgtgtgctggaggtgtcaggg

SEQ ID NO: 52449 - DNA, 22 bp, synthetic construct
  misc_feature 1..22: note = chemically synthesized
  source 1..22: mol_type = other DNA
tgtgctggaggtgtcagggaag

SEQ ID NO: 52450 - DNA, 22 bp, synthetic construct
  misc_feature 1..22: note = chemically synthesized
  source 1..22: mol_type = other DNA
gaggtgtcagggaagtggccag

SEQ ID NO: 52451 - DNA, 22 bp, synthetic construct
  misc_feature 1..22: note = chemically synthesized
  source 1..22: mol_type = other DNA
ctttctcaagcccaagggcatt

SEQ ID NO: 52452 - DNA, 22 bp, synthetic construct
  misc_feature 1..22: note = chemically synthesized
  source 1..22: mol_type = other DNA
tttctcaagcccaagggcatta

SEQ ID NO: 52453 - DNA, 22 bp, synthetic construct
  misc_feature 1..22: note = chemically synthesized
  source 1..22: mol_type = other DNA
tctcaagcccaagggcattaac

SEQ ID NO: 52454 - DNA, 22 bp, synthetic construct
  misc_feature 1..22: note = chemically synthesized
  source 1..22: mol_type = other DNA
ctcaagcccaagggcattaacg

SEQ ID NO: 52455 - DNA, 22 bp, synthetic construct
  misc_feature 1..22: note = chemically synthesized
  source 1..22: mol_type = other DNA
tcaagcccaagggcattaacgg

SEQ ID NO: 52456 - DNA, 22 bp, synthetic construct
  misc_feature 1..22: note = chemically synthesized
  source 1..22: mol_type = other DNA
aagcccaagggcattaacggtg

SEQ ID NO: 52457 - DNA, 22 bp, synthetic construct
  misc_feature 1..22: note = chemically synthesized
  source 1..22: mol_type = other DNA
acggtggtactgctgcagctga

SEQ ID NO: 52458 - DNA, 22 bp, synthetic construct
  misc_feature 1..22: note = chemically synthesized
  source 1..22: mol_type = other DNA
ctgcagctgaaatggcagaggg

SEQ ID NO: 52459 - DNA, 22 bp, synthetic construct
  misc_feature 1..22: note = chemically synthesized
  source 1..22: mol_type = other DNA
cagctgaaatggcagaggggct

SEQ ID NO: 52460 - DNA, 22 bp, synthetic construct
  misc_feature 1..22: note = chemically synthesized
  source 1..22: mol_type = other DNA
aaatggcagaggggctgtgggt

SEQ ID NO: 52461 - DNA, 22 bp, synthetic construct
  misc_feature 1..22: note = chemically synthesized
  source 1..22: mol_type = other DNA
tgggttgtctcttggatttcct

SEQ ID NO: 52462 - DNA, 22 bp, synthetic construct
  misc_feature 1..22: note = chemically synthesized
  source 1..22: mol_type = other DNA
tctcttggatttcctccccaga

SEQ ID NO: 52463 - DNA, 22 bp, synthetic construct
  misc_feature 1..22: note = chemically synthesized
  source 1..22: mol_type = other DNA
ttggatttcctccccagagaag

SEQ ID NO: 52464 - DNA, 22 bp, synthetic construct
  misc_feature 1..22: note = chemically synthesized
  source 1..22: mol_type = other DNA
ggatttcctccccagagaagca

SEQ ID NO: 52465 - DNA, 22 bp, synthetic construct
  misc_feature 1..22: note = chemically synthesized
  source 1..22: mol_type = other DNA
gatttcctccccagagaagcac

SEQ ID NO: 52466 - DNA, 22 bp, synthetic construct
  misc_feature 1..22: note = chemically synthesized
  source 1..22: mol_type = other DNA
cctccccagagaagcacagagc

SEQ ID NO: 52467 - DNA, 22 bp, synthetic construct
  misc_feature 1..22: note = chemically synthesized
  source 1..22: mol_type = other DNA
ctccccagagaagcacagagcc

SEQ ID NO: 52468 - DNA, 22 bp, synthetic construct
  misc_feature 1..22: note = chemically synthesized
  source 1..22: mol_type = other DNA
cccagagaagcacagagccaac

SEQ ID NO: 52469 - DNA, 22 bp, synthetic construct
  misc_feature 1..22: note = chemically synthesized
  source 1..22: mol_type = other DNA
actaaaatgttcaggcagggcc

SEQ ID NO: 52470 - DNA, 22 bp, synthetic construct
  misc_feature 1..22: note = chemically synthesized
  source 1..22: mol_type = other DNA
aaatgttcaggcagggccaggg

SEQ ID NO: 52471 - DNA, 22 bp, synthetic construct
  misc_feature 1..22: note = chemically synthesized
  source 1..22: mol_type = other DNA
aggcagggccagggtggctgtg

SEQ ID NO: 52472 - DNA, 22 bp, synthetic construct
  misc_feature 1..22: note = chemically synthesized
  source 1..22: mol_type = other DNA
tgctctgcccagtgaggaatag

SEQ ID NO: 52473 - DNA, 22 bp, synthetic construct
  misc_feature 1..22: note = chemically synthesized
  source 1..22: mol_type = other DNA
tgcccagtgaggaatagtaggg

SEQ ID NO: 52474 - DNA, 22 bp, synthetic construct
  misc_feature 1..22: note = chemically synthesized
  source 1..22: mol_type = other DNA
cccagtgaggaatagtaggggc

SEQ ID NO: 52475 - DNA, 22 bp, synthetic construct
  misc_feature 1..22: note = chemically synthesized
  source 1..22: mol_type = other DNA
ttccataaggcagctacactgt

SEQ ID NO: 52476 - DNA, 22 bp, synthetic construct
  misc_feature 1..22: note = chemically synthesized
  source 1..22: mol_type = other DNA
tccataaggcagctacactgtg

SEQ ID NO: 52477 - DNA, 22 bp, synthetic construct
  misc_feature 1..22: note = chemically synthesized
  source 1..22: mol_type = other DNA
ccataaggcagctacactgtgc

SEQ ID NO: 52478 - DNA, 22 bp, synthetic construct
  misc_feature 1..22: note = chemically synthesized
  source 1..22: mol_type = other DNA
cataaggcagctacactgtgct

SEQ ID NO: 52479 - DNA, 22 bp, synthetic construct
  misc_feature 1..22: note = chemically synthesized
  source 1..22: mol_type = other DNA
cactgtgctggaggtccgtgag

SEQ ID NO: 52480 - DNA, 22 bp, synthetic construct
  misc_feature 1..22: note = chemically synthesized
  source 1..22: mol_type = other DNA
tgctggaggtccgtgagagtcc

SEQ ID NO: 52481 - DNA, 22 bp, synthetic construct
  misc_feature 1..22: note = chemically synthesized
  source 1..22: mol_type = other DNA
gaggtccgtgagagtcctgaag

SEQ ID NO: 52482 - DNA, 22 bp, synthetic construct
  misc_feature 1..22: note = chemically synthesized
  source 1..22: mol_type = other DNA
aagctcctcgctccctcctgag

SEQ ID NO: 52483 - DNA, 22 bp, synthetic construct
  misc_feature 1..22: note = chemically synthesized
  source 1..22: mol_type = other DNA
ctcgctccctcctgagcccata

SEQ ID NO: 52484 - DNA, 22 bp, synthetic construct
  misc_feature 1..22: note = chemically synthesized
  source 1..22: mol_type = other DNA
gctccctcctgagcccatactt

SEQ ID NO: 52485 - DNA, 22 bp, synthetic construct
  misc_feature 1..22: note = chemically synthesized
  source 1..22: mol_type = other DNA
cctcctgagcccatactttaat

SEQ ID NO: 52486 - DNA, 22 bp, synthetic construct
  misc_feature 1..22: note = chemically synthesized
  source 1..22: mol_type = other DNA
ctgagcccatactttaatctca

SEQ ID NO: 52487 - DNA, 22 bp, synthetic construct
  misc_feature 1..22: note = chemically synthesized
  source 1..22: mol_type = other DNA
agcccatactttaatctcaaga

SEQ ID NO: 52488 - DNA, 22 bp, synthetic construct
  misc_feature 1..22: note = chemically synthesized
  source 1..22: mol_type = other DNA
taatctcaagagtttgagataa

SEQ ID NO: 52489 - DNA, 22 bp, synthetic construct
  misc_feature 1..22: note = chemically synthesized
  source 1..22: mol_type = other DNA
aatctcaagagtttgagataaa

SEQ ID NO: 52490 - DNA, 22 bp, synthetic construct
  misc_feature 1..22: note = chemically synthesized
  source 1..22: mol_type = other DNA
atctcaagagtttgagataaac

SEQ ID NO: 52491 - DNA, 22 bp, synthetic construct
  misc_feature 1..22: note = chemically synthesized
  source 1..22: mol_type = other DNA
aagagtttgagataaacagtgg

SEQ ID NO: 52492 - DNA, 22 bp, synthetic construct
  misc_feature 1..22: note = chemically synthesized
  source 1..22: mol_type = other DNA
gagataaacagtggtaaggaag

SEQ ID NO: 52493 - DNA, 22 bp, synthetic construct
  misc_feature 1..22: note = chemically synthesized
  source 1..22: mol_type = other DNA
agataaacagtggtaaggaaga

SEQ ID NO: 52494 - DNA, 22 bp, synthetic construct
  misc_feature 1..22: note = chemically synthesized
  source 1..22: mol_type = other DNA
atgaaacccaggaagataagtc

SEQ ID NO: 52495 - DNA, 22 bp, synthetic construct
  misc_feature 1..22: note = chemically synthesized
  source 1..22: mol_type = other DNA
caacctaaagaaatacttttta

SEQ ID NO: 52496 - DNA, 22 bp, synthetic construct
  misc_feature 1..22: note = chemically synthesized
  source 1..22: mol_type = other DNA
aagaaatactttttaaaaatca

SEQ ID NO: 52497 - DNA, 22 bp, synthetic construct
  misc_feature 1..22: note = chemically synthesized
  source 1..22: mol_type = other DNA
tttaaaaatcatatttatagag

SEQ ID NO: 52498 - DNA, 22 bp, synthetic construct
  misc_feature 1..22: note = chemically synthesized
  source 1..22: mol_type = other DNA
ttaaaaatcatatttatagagg

SEQ ID NO: 52499 - DNA, 22 bp, synthetic construct
  misc_feature 1..22: note = chemically synthesized
  source 1..22: mol_type = other DNA
taaaaatcatatttatagaggt

SEQ ID NO: 52500 - DNA, 22 bp, synthetic construct
  misc_feature 1..22: note = chemically synthesized
  source 1..22: mol_type = other DNA
aaaaatcatatttatagaggtt

SEQ ID NO: 52501 - DNA, 22 bp, synthetic construct
  misc_feature 1..22: note = chemically synthesized
  source 1..22: mol_type = other DNA
aaaatcatatttatagaggttt

SEQ ID NO: 52502 - DNA, 22 bp, synthetic construct
  misc_feature 1..22: note = chemically synthesized
  source 1..22: mol_type = other DNA
atagaggtttgcagtgatacta

SEQ ID NO: 52503 - DNA, 22 bp, synthetic construct
  misc_feature 1..22: note = chemically synthesized
  source 1..22: mol_type = other DNA
tagaggtttgcagtgatactaa

SEQ ID NO: 52504 - DNA, 22 bp, synthetic construct
  misc_feature 1..22: note = chemically synthesized
  source 1..22: mol_type = other DNA
gcagtgatactaaagacaatat

SEQ ID NO: 52505 - DNA, 22 bp, synthetic construct
  misc_feature 1..22: note = chemically synthesized
  source 1..22: mol_type = other DNA
cagtgatactaaagacaatatt

SEQ ID NO: 52506 - DNA, 22 bp, synthetic construct
  misc_feature 1..22: note = chemically synthesized
  source 1..22: mol_type = other DNA
aagacaatattgcaaatcatta

SEQ ID NO: 52507 - DNA, 22 bp, synthetic construct
  misc_feature 1..22: note = chemically synthesized
  source 1..22: mol_type = other DNA
caaatcattattaagaatacaa

SEQ ID NO: 52508 - DNA, 22 bp, synthetic construct
  misc_feature 1..22: note = chemically synthesized
  source 1..22: mol_type = other DNA
ttaagaatacaagaagtacaat

SEQ ID NO: 52509 - DNA, 22 bp, synthetic construct
  misc_feature 1..22: note = chemically synthesized
  source 1..22: mol_type = other DNA
agaatacaagaagtacaatgtt

SEQ ID NO: 52510 - DNA, 22 bp, synthetic construct
  misc_feature 1..22: note = chemically synthesized
  source 1..22: mol_type = other DNA
cttgtttctttaacacctgtga

SEQ ID NO: 52511 - DNA, 22 bp, synthetic construct
  misc_feature 1..22: note = chemically synthesized
  source 1..22: mol_type = other DNA
ttgtttctttaacacctgtgat

SEQ ID NO: 52512 - DNA, 22 bp, synthetic construct
  misc_feature 1..22: note = chemically synthesized
  source 1..22: mol_type = other DNA
gtttctttaacacctgtgatac

SEQ ID NO: 52513 - DNA, 22 bp, synthetic construct
  misc_feature 1..22: note = chemically synthesized
  source 1..22: mol_type = other DNA
tttctttaacacctgtgataca

SEQ ID NO: 52514 - DNA, 22 bp, synthetic construct
  misc_feature 1..22: note = chemically synthesized
  source 1..22: mol_type = other DNA
ctttaacacctgtgatacaggt

SEQ ID NO: 52515 - DNA, 22 bp, synthetic construct
  misc_feature 1..22: note = chemically synthesized
  source 1..22: mol_type = other DNA
tttaacacctgtgatacaggtg

SEQ ID NO: 52516 - DNA, 22 bp, synthetic construct
  misc_feature 1..22: note = chemically synthesized
  source 1..22: mol_type = other DNA
taacacctgtgatacaggtgtt

SEQ ID NO: 52517 - DNA, 22 bp, synthetic construct
  misc_feature 1..22: note = chemically synthesized
  source 1..22: mol_type = other DNA
aacacctgtgatacaggtgttt

SEQ ID NO: 52518 - DNA, 22 bp, synthetic construct
  misc_feature 1..22: note = chemically synthesized
  source 1..22: mol_type = other DNA
acacctgtgatacaggtgtttg

SEQ ID NO: 52519 - DNA, 22 bp, synthetic construct
  misc_feature 1..22: note = chemically synthesized
  source 1..22: mol_type = other DNA
tgatacaggtgtttgatatgaa

SEQ ID NO: 52520 - DNA, 22 bp, synthetic construct
  misc_feature 1..22: note = chemically synthesized
  source 1..22: mol_type = other DNA
gatatgaattctacgtaatggc

SEQ ID NO: 52521 - DNA, 22 bp, synthetic construct
  misc_feature 1..22: note = chemically synthesized
  source 1..22: mol_type = other DNA
atatgaattctacgtaatggct

SEQ ID NO: 52522 - DNA, 22 bp, synthetic construct
  misc_feature 1..22: note = chemically synthesized
  source 1..22: mol_type = other DNA
tacgtaatggctgcattgcttc

SEQ ID NO: 52523 - DNA, 22 bp, synthetic construct
  misc_feature 1..22: note = chemically synthesized
  source 1..22: mol_type = other DNA
cgtaatggctgcattgcttctt

SEQ ID NO: 52524 - DNA, 22 bp, synthetic construct
  misc_feature 1..22: note = chemically synthesized
  source 1..22: mol_type = other DNA
cattgcttcttgccaccaccca

SEQ ID NO: 52525 - DNA, 22 bp, synthetic construct
  misc_feature 1..22: note = chemically synthesized
  source 1..22: mol_type = other DNA
cttcttgccaccacccaaagaa

SEQ ID NO: 52526 - DNA, 22 bp, synthetic construct
  misc_feature 1..22: note = chemically synthesized
  source 1..22: mol_type = other DNA
cttgccaccacccaaagaaggt

SEQ ID NO: 52527 - DNA, 22 bp, synthetic construct
  misc_feature 1..22: note = chemically synthesized
  source 1..22: mol_type = other DNA
ttgccaccacccaaagaaggtt

SEQ ID NO: 52528 - DNA, 22 bp, synthetic construct
  misc_feature 1..22: note = chemically synthesized
  source 1..22: mol_type = other DNA
gccaccacccaaagaaggttgt

SEQ ID NO: 52529 - DNA, 22 bp, synthetic construct
  misc_feature 1..22: note = chemically synthesized
  source 1..22: mol_type = other DNA
ccaccacccaaagaaggttgta

SEQ ID NO: 52530 - DNA, 22 bp, synthetic construct
  misc_feature 1..22: note = chemically synthesized
  source 1..22: mol_type = other DNA
tatagcactcagatgtatacta

SEQ ID NO: 52531 - DNA, 22 bp, synthetic construct
  misc_feature 1..22: note = chemically synthesized
  source 1..22: mol_type = other DNA
agatgtatactaactgcaaccg

SEQ ID NO: 52532 - DNA, 22 bp, synthetic construct
  misc_feature 1..22: note = chemically synthesized
  source 1..22: mol_type = other DNA
actgcaaccgtgtatctcttag

SEQ ID NO: 52533 - DNA, 22 bp, synthetic construct
  misc_feature 1..22: note = chemically synthesized
  source 1..22: mol_type = other DNA
caaccgtgtatctcttaggaat

SEQ ID NO: 52534 - DNA, 22 bp, synthetic construct
  misc_feature 1..22: note = chemically synthesized
  source 1..22: mol_type = other DNA
ttaggaatttctcctttgccct

SEQ ID NO: 52535 - DNA, 22 bp, synthetic construct
  misc_feature 1..22: note = chemically synthesized
  source 1..22: mol_type = other DNA
aggaatttctcctttgccctct

SEQ ID NO: 52536 - DNA, 22 bp, synthetic construct
  misc_feature 1..22: note = chemically synthesized
  source 1..22: mol_type = other DNA
ggaatttctcctttgccctctt

SEQ ID NO: 52537 - DNA, 22 bp, synthetic construct
  misc_feature 1..22: note = chemically synthesized
  source 1..22: mol_type = other DNA
ctcctttgccctcttccctccc

SEQ ID NO: 52538 - DNA, 22 bp, synthetic construct
  misc_feature 1..22: note = chemically synthesized
  source 1..22: mol_type = other DNA
tcctttgccctcttccctccct

SEQ ID NO: 52539 - DNA, 22 bp, synthetic construct
  misc_feature 1..22: note = chemically synthesized
  source 1..22: mol_type = other DNA
ctttgccctcttccctccctat

SEQ ID NO: 52540 - DNA, 22 bp, synthetic construct
  misc_feature 1..22: note = chemically synthesized
  source 1..22: mol_type = other DNA
tgccctcttccctccctatcag

SEQ ID NO: 52541 - DNA, 22 bp, synthetic construct
  misc_feature 1..22: note = chemically synthesized
  source 1..22: mol_type = other DNA
gccctcttccctccctatcagc

SEQ ID NO: 52542 - DNA, 22 bp, synthetic construct
  misc_feature 1..22: note = chemically synthesized
  source 1..22: mol_type = other DNA
ccctcttccctccctatcagca

SEQ ID NO: 52543 - DNA, 22 bp, synthetic construct
  misc_feature 1..22: note = chemically synthesized
  source 1..22: mol_type = other DNA
ttccctccctatcagcatgtat

SEQ ID NO: 52544 - DNA, 22 bp, synthetic construct
  misc_feature 1..22: note = chemically synthesized
  source 1..22: mol_type = other DNA
ccctccctatcagcatgtatct

SEQ ID NO: 52545 - DNA, 22 bp, synthetic construct
  misc_feature 1..22: note = chemically synthesized
  source 1..22: mol_type = other DNA
cctccctatcagcatgtatcta

SEQ ID NO: 52546 - DNA, 22 bp, synthetic construct
  misc_feature 1..22: note = chemically synthesized
  source 1..22: mol_type = other DNA
cctatcagcatgtatctagcag

SEQ ID NO: 52547 - DNA, 22 bp, synthetic construct
  misc_feature 1..22: note = chemically synthesized
  source 1..22: mol_type = other DNA
tcagcatgtatctagcagcatt

SEQ ID NO: 52548 - DNA, 22 bp, synthetic construct
  misc_feature 1..22: note = chemically synthesized
  source 1..22: mol_type = other DNA
gcagcattctgaaaagttaact

SEQ ID NO: 52549 - DNA, 22 bp, synthetic construct
  misc_feature 1..22: note = chemically synthesized
  source 1..22: mol_type = other DNA
tgaaaagttaactgcacagtga

SEQ ID NO: 52550 - DNA, 22 bp, synthetic construct
  misc_feature 1..22: note = chemically synthesized
  source 1..22: mol_type = other DNA
aaaagttaactgcacagtgagc

SEQ ID NO: 52551 - DNA, 22 bp, synthetic construct
  misc_feature 1..22: note = chemically synthesized
  source 1..22: mol_type = other DNA
actgcacagtgagcgactgctg

SEQ ID NO: 52552 - DNA, 22 bp, synthetic construct
  misc_feature 1..22: note = chemically synthesized
  source 1..22: mol_type = other DNA
cacagtgagcgactgctgggca

SEQ ID NO: 52553 - DNA, 22 bp, synthetic construct
  misc_feature 1..22: note = chemically synthesized
  source 1..22: mol_type = other DNA
ctgggcatcttaaggggcattc

SEQ ID NO: 52554 - DNA, 22 bp, synthetic construct
  misc_feature 1..22: note = chemically synthesized
  source 1..22: mol_type = other DNA
ggcatcttaaggggcattcttt

SEQ ID NO: 52555 - DNA, 22 bp, synthetic construct
  misc_feature 1..22: note = chemically synthesized
  source 1..22: mol_type = other DNA
aaggggcattcttttctaccta

SEQ ID NO: 52556 - DNA, 22 bp, synthetic construct
  misc_feature 1..22: note = chemically synthesized
  source 1..22: mol_type = other DNA
aggggcattcttttctacctag

SEQ ID NO: 52557 - DNA, 22 bp, synthetic construct
  misc_feature 1..22: note = chemically synthesized
  source 1..22: mol_type = other DNA
ttttctacctaggtattccccc

SEQ ID NO: 52558 - DNA, 22 bp, synthetic construct
  misc_feature 1..22: note = chemically synthesized
  source 1..22: mol_type = other DNA
ttctacctaggtattccccctc

SEQ ID NO: 52559 - DNA, 22 bp, synthetic construct
  misc_feature 1..22: note = chemically synthesized
  source 1..22: mol_type = other DNA
tctacctaggtattccccctcc

SEQ ID NO: 52560 - DNA, 22 bp, synthetic construct
  misc_feature 1..22: note = chemically synthesized
  source 1..22: mol_type = other DNA
ctacctaggtattccccctcct

SEQ ID NO: 52561 - DNA, 22 bp, synthetic construct
  misc_feature 1..22: note = chemically synthesized
  source 1..22: mol_type = other DNA
tacctaggtattccccctcctc

SEQ ID NO: 52562 - DNA, 22 bp, synthetic construct
  misc_feature 1..22: note = chemically synthesized
  source 1..22: mol_type = other DNA
cctaggtattccccctcctcca

SEQ ID NO: 52563 - DNA, 22 bp, synthetic construct
  misc_feature 1..22: note = chemically synthesized
  source 1..22: mol_type = other DNA
ggtattccccctcctccactca

SEQ ID NO: 52564 - DNA, 22 bp, synthetic construct
  misc_feature 1..22: note = chemically synthesized
  source 1..22: mol_type = other DNA
cccctcctccactcatgtctag

SEQ ID NO: 52565 - DNA, 22 bp, synthetic construct
  misc_feature 1..22: note = chemically synthesized
  source 1..22: mol_type = other DNA
ctccactcatgtctagcatgca

SEQ ID NO: 52566 - DNA, 22 bp, synthetic construct
  misc_feature 1..22: note = chemically synthesized
  source 1..22: mol_type = other DNA
cactcatgtctagcatgcagga

SEQ ID NO: 52567 - DNA, 22 bp, synthetic construct
  misc_feature 1..22: note = chemically synthesized
  source 1..22: mol_type = other DNA
atgtctagcatgcaggacttgg

SEQ ID NO: 52568 - DNA, 22 bp, synthetic construct
  misc_feature 1..22: note = chemically synthesized
  source 1..22: mol_type = other DNA
gcatgcaggacttgggtaatct

SEQ ID NO: 52569 - DNA, 22 bp, synthetic construct
  misc_feature 1..22: note = chemically synthesized
  source 1..22: mol_type = other DNA
gggtaatctctggggtttcaga

SEQ ID NO: 52570 - DNA, 22 bp, synthetic construct
  misc_feature 1..22: note = chemically synthesized
  source 1..22: mol_type = other DNA
ggtaatctctggggtttcagat

SEQ ID NO: 52571 - DNA, 22 bp, synthetic construct
  misc_feature 1..22: note = chemically synthesized
  source 1..22: mol_type = other DNA
tggggtttcagattctccagac

SEQ ID NO: 52572 - DNA, 22 bp, synthetic construct
  misc_feature 1..22: note = chemically synthesized
  source 1..22: mol_type = other DNA
gggtttcagattctccagacct

SEQ ID NO: 52573 - DNA, 22 bp, synthetic construct
  misc_feature 1..22: note = chemically synthesized
  source 1..22: mol_type = other DNA
cagattctccagacctccattc

SEQ ID NO: 52574 - DNA, 22 bp, synthetic construct
  misc_feature 1..22: note = chemically synthesized
  source 1..22: mol_type = other DNA
agattctccagacctccattct

SEQ ID NO: 52575 - DNA, 22 bp, synthetic construct
  misc_feature 1..22: note = chemically synthesized
  source 1..22: mol_type = other DNA
tccagacctccattctctcagg

SEQ ID NO: 52576 - DNA, 22 bp, synthetic construct
  misc_feature 1..22: note = chemically synthesized
  source 1..22: mol_type = other DNA
cagacctccattctctcagggg

SEQ ID NO: 52577 - DNA, 22 bp, synthetic construct
  misc_feature 1..22: note = chemically synthesized
  source 1..22: mol_type = other DNA
cattctctcaggggcttccacc

SEQ ID NO: 52578 - DNA, 22 bp, synthetic construct
  misc_feature 1..22: note = chemically synthesized
  source 1..22: mol_type = other DNA
tctcaggggcttccacctcctg

SEQ ID NO: 52579 - DNA, 22 bp, synthetic construct
  misc_feature 1..22: note = chemically synthesized
  source 1..22: mol_type = other DNA
tcaggggcttccacctcctgct

SEQ ID NO: 52580 - DNA, 22 bp, synthetic construct
  misc_feature 1..22: note = chemically synthesized
  source 1..22: mol_type = other DNA
aggggcttccacctcctgctca

SEQ ID NO: 52581 - DNA, 22 bp, synthetic construct
  misc_feature 1..22: note = chemically synthesized
  source 1..22: mol_type = other DNA
ccacctcctgctcatatctagc

SEQ ID NO: 52582 - DNA, 22 bp, synthetic construct
  misc_feature 1..22: note = chemically synthesized
  source 1..22: mol_type = other DNA
cacctcctgctcatatctagct

SEQ ID NO: 52583 - DNA, 22 bp, synthetic construct
  misc_feature 1..22: note = chemically synthesized
  source 1..22: mol_type = other DNA
ctgctcatatctagctatctgc

SEQ ID NO: 52584 - DNA, 22 bp, synthetic construct
  misc_feature 1..22: note = chemically synthesized
  source 1..22: mol_type = other DNA
ctcatatctagctatctgccta

SEQ ID NO: 52585 - DNA, 22 bp, synthetic construct
  misc_feature 1..22: note = chemically synthesized
  source 1..22: mol_type = other DNA
atatctagctatctgcctagtc

SEQ ID NO: 52586 - DNA, 22 bp, synthetic construct
  misc_feature 1..22: note = chemically synthesized
  source 1..22: mol_type = other DNA
gctatctgcctagtctaaccat

SEQ ID NO: 52587 - DNA, 22 bp, synthetic construct
  misc_feature 1..22: note = chemically synthesized
  source 1..22: mol_type = other DNA
tctgcctagtctaaccataaaa

SEQ ID NO: 52588 - DNA, 22 bp, synthetic construct
  misc_feature 1..22: note = chemically synthesized
  source 1..22: mol_type = other DNA
cctagtctaaccataaaatctt

SEQ ID NO: 52589 - DNA, 22 bp, synthetic construct
  misc_feature 1..22: note = chemically synthesized
  source 1..22: mol_type = other DNA
gtctaaccataaaatcttaaat

SEQ ID NO: 52590 - DNA, 22 bp, synthetic construct
  misc_feature 1..22: note = chemically synthesized
  source 1..22: mol_type = other DNA
accataaaatcttaaataagaa

SEQ ID NO: 52591 - DNA, 22 bp, synthetic construct
  misc_feature 1..22: note = chemically synthesized
  source 1..22: mol_type = other DNA
aaataagaataaatcatgtttg

SEQ ID NO: 52592 - DNA, 22 bp, synthetic construct
  misc_feature 1..22: note = chemically synthesized
  source 1..22: mol_type = other DNA
aataagaataaatcatgtttgc

SEQ ID NO: 52593 - DNA, 22 bp, synthetic construct
  misc_feature 1..22: note = chemically synthesized
  source 1..22: mol_type = other DNA
gctcttgattgccatgtcatga

SEQ ID NO: 52594 - DNA, 22 bp, synthetic construct
  misc_feature 1..22: note = chemically synthesized
  source 1..22: mol_type = other DNA
ctcttgattgccatgtcatgat

SEQ ID NO: 52595 - DNA, 22 bp, synthetic construct
  misc_feature 1..22: note = chemically synthesized
  source 1..22: mol_type = other DNA
ttgattgccatgtcatgataaa

SEQ ID NO: 52596 - DNA, 22 bp, synthetic construct
  misc_feature 1..22: note = chemically synthesized
  source 1..22: mol_type = other DNA
gattgccatgtcatgataaaaa

SEQ ID NO: 52597 - DNA, 22 bp, synthetic construct
  misc_feature 1..22: note = chemically synthesized
  source 1..22: mol_type = other DNA
attgccatgtcatgataaaaaa

SEQ ID NO: 52598 - DNA, 22 bp, synthetic construct
  misc_feature 1..22: note = chemically synthesized
  source 1..22: mol_type = other DNA
ccatgtcatgataaaaaaaata

SEQ ID NO: 52599 - DNA, 22 bp, synthetic construct
  misc_feature 1..22: note = chemically synthesized
  source 1..22: mol_type = other DNA
tgttgccaagattgatgttgat

SEQ ID NO: 52600 - DNA, 22 bp, synthetic construct
  misc_feature 1..22: note = chemically synthesized
  source 1..22: mol_type = other DNA
ccaagattgatgttgatctgct

SEQ ID NO: 52601 - DNA, 22 bp, synthetic construct
  misc_feature 1..22: note = chemically synthesized
  source 1..22: mol_type = other DNA
atgttgatctgctaatccctgt

SEQ ID NO: 52602 - DNA, 22 bp, synthetic construct
  misc_feature 1..22: note = chemically synthesized
  source 1..22: mol_type = other DNA
atctgctaatccctgtgtagaa

SEQ ID NO: 52603 - DNA, 22 bp, synthetic construct
  misc_feature 1..22: note = chemically synthesized
  source 1..22: mol_type = other DNA
ctaatccctgtgtagaaatgaa

SEQ ID NO: 52604 - DNA, 22 bp, synthetic construct
  misc_feature 1..22: note = chemically synthesized
  source 1..22: mol_type = other DNA
atccctgtgtagaaatgaacct

SEQ ID NO: 52605 - DNA, 22 bp, synthetic construct
  misc_feature 1..22: note = chemically synthesized
  source 1..22: mol_type = other DNA
tgtagaaatgaaccttggaggc

SEQ ID NO: 52606 - DNA, 22 bp, synthetic construct
  misc_feature 1..22: note = chemically synthesized
  source 1..22: mol_type = other DNA
ggaggccattgtttgatttctt

SEQ ID NO: 52607 - DNA, 22 bp, synthetic construct
  misc_feature 1..22: note = chemically synthesized
  source 1..22: mol_type = other DNA
gaggccattgtttgatttctta

SEQ ID NO: 52608 - DNA, 22 bp, synthetic construct
  misc_feature 1..22: note = chemically synthesized
  source 1..22: mol_type = other DNA
tttgatttcttacaatatgtgc

SEQ ID NO: 52609 - DNA, 22 bp, synthetic construct
  misc_feature 1..22: note = chemically synthesized
  source 1..22: mol_type = other DNA
gatttcttacaatatgtgcatt

SEQ ID NO: 52610 - DNA, 22 bp, synthetic construct
  misc_feature 1..22: note = chemically synthesized
  source 1..22: mol_type = other DNA
atttcttacaatatgtgcattg

SEQ ID NO: 52611 - DNA, 22 bp, synthetic construct
  misc_feature 1..22: note = chemically synthesized
  source 1..22: mol_type = other DNA
cttacaatatgtgcattggttg

SEQ ID NO: 52612 - DNA, 22 bp, synthetic construct
  misc_feature 1..22: note = chemically synthesized
  source 1..22: mol_type = other DNA
ttacaatatgtgcattggttgt

SEQ ID NO: 52613 - DNA, 22 bp, synthetic construct
  misc_feature 1..22: note = chemically synthesized
  source 1..22: mol_type = other DNA
acaatatgtgcattggttgtaa

SEQ ID NO: 52614 - DNA, 22 bp, synthetic construct
  misc_feature 1..22: note = chemically synthesized
  source 1..22: mol_type = other DNA
caatatgtgcattggttgtaac

SEQ ID NO: 52615 - DNA, 22 bp, synthetic construct
  misc_feature 1..22: note = chemically synthesized
  source 1..22: mol_type = other DNA
gttgtaacactgtcactttgac

SEQ ID NO: 52616 - DNA, 22 bp, synthetic construct
  misc_feature 1..22: note = chemically synthesized
  source 1..22: mol_type = other DNA
taacactgtcactttgacagtt

SEQ ID NO: 52617 - DNA, 22 bp, synthetic construct
  misc_feature 1..22: note = chemically synthesized
  source 1..22: mol_type = other DNA
tcactttgacagttgataagca

SEQ ID NO: 52618 - DNA, 22 bp, synthetic construct
  misc_feature 1..22: note = chemically synthesized
  source 1..22: mol_type = other DNA
tgacagttgataagcatcttct

SEQ ID NO: 52619 - DNA, 22 bp, synthetic construct
  misc_feature 1..22: note = chemically synthesized
  source 1..22: mol_type = other DNA
gacagttgataagcatcttctg

SEQ ID NO: 52620 - DNA, 22 bp, synthetic construct
  misc_feature 1..22: note = chemically synthesized
  source 1..22: mol_type = other DNA
acagttgataagcatcttctga

SEQ ID NO: 52621 - DNA, 22 bp, synthetic construct
  misc_feature 1..22: note = chemically synthesized
  source 1..22: mol_type = other DNA
ataagcatcttctgaatggtcc

SEQ ID NO: 52622 - DNA, 22 bp, synthetic construct
  misc_feature 1..22: note = chemically synthesized
  source 1..22: mol_type = other DNA
ctgaatggtccctcctttagtt

SEQ ID NO: 52623 - DNA, 22 bp, synthetic construct
  misc_feature 1..22: note = chemically synthesized
  source 1..22: mol_type = other DNA
tgaatggtccctcctttagtta

SEQ ID NO: 52624 - DNA, 22 bp, synthetic construct
  misc_feature 1..22: note = chemically synthesized
  source 1..22: mol_type = other DNA
aatggtccctcctttagttaca

SEQ ID NO: 52625 - DNA, 22 bp, synthetic construct
  misc_feature 1..22: note = chemically synthesized
  source 1..22: mol_type = other DNA
ctttagttacaaaaatgttggt

SEQ ID NO: 52626 - DNA, 22 bp, synthetic construct
  misc_feature 1..22: note = chemically synthesized
  source 1..22: mol_type = other DNA
tagttacaaaaatgttggtgca

SEQ ID NO: 52627 - DNA, 22 bp, synthetic construct
  misc_feature 1..22: note = chemically synthesized
  source 1..22: mol_type = other DNA
agttacaaaaatgttggtgcat

SEQ ID NO: 52628 - DNA, 22 bp, synthetic construct
  misc_feature 1..22: note = chemically synthesized
  source 1..22: mol_type = other DNA
gttacaaaaatgttggtgcatg

SEQ ID NO: 52629 - DNA, 22 bp, synthetic construct
  misc_feature 1..22: note = chemically synthesized
  source 1..22: mol_type = other DNA
caaaaatgttggtgcatggatg

SEQ ID NO: 52630 - DNA, 22 bp, synthetic construct
  misc_feature 1..22: note = chemically synthesized
  source 1..22: mol_type = other DNA
gtgcatggatgatgttgggaat

SEQ ID NO: 52631 - DNA, 22 bp, synthetic construct
  misc_feature 1..22: note = chemically synthesized
  source 1..22: mol_type = other DNA
ggaataaataaaaagtgaacta

SEQ ID NO: 52632 - DNA, 22 bp, synthetic construct
  misc_feature 1..22: note = chemically synthesized
  source 1..22: mol_type = other DNA
aattatgttctcatcttgggca

SEQ ID NO: 52633 - DNA, 22 bp, synthetic construct
  misc_feature 1..22: note = chemically synthesized
  source 1..22: mol_type = other DNA
tgttctcatcttgggcaaaaat

SEQ ID NO: 52634 - DNA, 22 bp, synthetic construct
  misc_feature 1..22: note = chemically synthesized
  source 1..22: mol_type = other DNA
tcatcttgggcaaaaattaagc

SEQ ID NO: 52635 - DNA, 22 bp, synthetic construct
  misc_feature 1..22: note = chemically synthesized
  source 1..22: mol_type = other DNA
atcttgggcaaaaattaagcaa

SEQ ID NO: 52636 - DNA, 22 bp, synthetic construct
  misc_feature 1..22: note = chemically synthesized
  source 1..22: mol_type = other DNA
gggcaaaaattaagcaaaaaaa

SEQ ID NO: 52637 - DNA, 22 bp, synthetic construct
  misc_feature 1..22: note = chemically synthesized
  source 1..22: mol_type = other DNA
ggcaaaaattaagcaaaaaaaa

SEQ ID NO: 52638 - DNA, 22 bp, synthetic construct
  misc_feature 1..22: note = chemically synthesized
  source 1..22: mol_type = other DNA
agcaaaaaaaaaatggaggata

SEQ ID NO: 52639 - DNA, 22 bp, synthetic construct
  misc_feature 1..22: note = chemically synthesized
  source 1..22: mol_type = other DNA
ctccacaaagaaggccattttt

SEQ ID NO: 52640 - DNA, 22 bp, synthetic construct
  misc_feature 1..22: note = chemically synthesized
  source 1..22: mol_type = other DNA
cacaaagaaggccatttttgta

SEQ ID NO: 52641 - DNA, 22 bp, synthetic construct
  misc_feature 1..22: note = chemically synthesized
  source 1..22: mol_type = other DNA
ttgtactaggcttactacagtg

SEQ ID NO: 52642 - DNA, 22 bp, synthetic construct
  misc_feature 1..22: note = chemically synthesized
  source 1..22: mol_type = other DNA
tgtactaggcttactacagtga

SEQ ID NO: 52643 - DNA, 22 bp, synthetic construct
  misc_feature 1..22: note = chemically synthesized
  source 1..22: mol_type = other DNA
gtactaggcttactacagtgac

SEQ ID NO: 52644 - DNA, 22 bp, synthetic construct
  misc_feature 1..22: note = chemically synthesized
  source 1..22: mol_type = other DNA
tactaggcttactacagtgaca

SEQ ID NO: 52645 - DNA, 22 bp, synthetic construct
  misc_feature 1..22: note = chemically synthesized
  source 1..22: mol_type = other DNA
ggcttactacagtgacacacca

SEQ ID NO: 52646 - DNA, 22 bp, synthetic construct
  misc_feature 1..22: note = chemically synthesized
  source 1..22: mol_type = other DNA
actacagtgacacaccactatt

SEQ ID NO: 52647 - DNA, 22 bp, synthetic construct
  misc_feature 1..22: note = chemically synthesized
  source 1..22: mol_type = other DNA
ctacagtgacacaccactatta

SEQ ID NO: 52648 - DNA, 22 bp, synthetic construct
  misc_feature 1..22: note = chemically synthesized
  source 1..22: mol_type = other DNA
cagtgacacaccactattagtt

SEQ ID NO: 52649 - DNA, 22 bp, synthetic construct
  misc_feature 1..22: note = chemically synthesized
  source 1..22: mol_type = other DNA
ttagttggggagaattcagttt

SEQ ID NO: 52650 - DNA, 22 bp, synthetic construct
  misc_feature 1..22: note = chemically synthesized
  source 1..22: mol_type = other DNA
gttggggagaattcagtttttc

SEQ ID NO: 52651 - DNA, 22 bp, synthetic construct
  misc_feature 1..22: note = chemically synthesized
  source 1..22: mol_type = other DNA
gggagaattcagtttttccaag

SEQ ID NO: 52652 - DNA, 22 bp, synthetic construct
  misc_feature 1..22: note = chemically synthesized
  source 1..22: mol_type = other DNA
agtttttccaaggtgttgatag

SEQ ID NO: 52653 - DNA, 22 bp, synthetic construct
  misc_feature 1..22: note = chemically synthesized
  source 1..22: mol_type = other DNA
ttccaaggtgttgataggcatc

SEQ ID NO: 52654 - DNA, 22 bp, synthetic construct
  misc_feature 1..22: note = chemically synthesized
  source 1..22: mol_type = other DNA
tccaaggtgttgataggcatcc

SEQ ID NO: 52655 - DNA, 22 bp, synthetic construct
  misc_feature 1..22: note = chemically synthesized
  source 1..22: mol_type = other DNA
ccaaggtgttgataggcatcca

SEQ ID NO: 52656 - DNA, 22 bp, synthetic construct
  misc_feature 1..22: note = chemically synthesized
  source 1..22: mol_type = other DNA
caaggtgttgataggcatccag

SEQ ID NO: 52657 - DNA, 22 bp, synthetic construct
  misc_feature 1..22: note = chemically synthesized
  source 1..22: mol_type = other DNA
ataggcatccagatttcagagg

SEQ ID NO: 52658 - DNA, 22 bp, synthetic construct
  misc_feature 1..22: note = chemically synthesized
  source 1..22: mol_type = other DNA
cagaggaaattgtaaaaaagca

SEQ ID NO: 52659 - DNA, 22 bp, synthetic construct
  misc_feature 1..22: note = chemically synthesized
  source 1..22: mol_type = other DNA
agaggaaattgtaaaaaagcag

SEQ ID NO: 52660 - DNA, 22 bp, synthetic construct
  misc_feature 1..22: note = chemically synthesized
  source 1..22: mol_type = other DNA
taaaaaagcagaacctgggacc

SEQ ID NO: 52661 - DNA, 22 bp, synthetic construct
  misc_feature 1..22: note = chemically synthesized
  source 1..22: mol_type = other DNA
ggaccaatactgcccacgattt

SEQ ID NO: 52662 - DNA, 22 bp, synthetic construct
  misc_feature 1..22: note = chemically synthesized
  source 1..22: mol_type = other DNA
cccacgatttttctttgagatc

SEQ ID NO: 52663 - DNA, 22 bp, synthetic construct
  misc_feature 1..22: note = chemically synthesized
  source 1..22: mol_type = other DNA
ttctttgagatcaaatctgagg

SEQ ID NO: 52664 - DNA, 22 bp, synthetic construct
  misc_feature 1..22: note = chemically synthesized
  source 1..22: mol_type = other DNA
tctttgagatcaaatctgaggc

SEQ ID NO: 52665 - DNA, 22 bp, synthetic construct
  misc_feature 1..22: note = chemically synthesized
  source 1..22: mol_type = other DNA
ctttgagatcaaatctgaggca

SEQ ID NO: 52666 - DNA, 22 bp, synthetic construct
  misc_feature 1..22: note = chemically synthesized
  source 1..22: mol_type = other DNA
tttgagatcaaatctgaggcaa

SEQ ID NO: 52667 - DNA, 22 bp, synthetic construct
  misc_feature 1..22: note = chemically synthesized
  source 1..22: mol_type = other DNA
tgagatcaaatctgaggcaaca

SEQ ID NO: 52668 - DNA, 22 bp, synthetic construct
  misc_feature 1..22: note = chemically synthesized
  source 1..22: mol_type = other DNA
gagatcaaatctgaggcaacaa

SEQ ID NO: 52669 - DNA, 22 bp, synthetic construct
  misc_feature 1..22: note = chemically synthesized
  source 1..22: mol_type = other DNA
agatcaaatctgaggcaacaaa

SEQ ID NO: 52670 - DNA, 22 bp, synthetic construct
  misc_feature 1..22: note = chemically synthesized
  source 1..22: mol_type = other DNA
aggcaacaaatctgttcaaaag

SEQ ID NO: 52671 - DNA, 22 bp, synthetic construct
  misc_feature 1..22: note = chemically synthesized
  source 1..22: mol_type = other DNA
ttcaaaagctgctttctgcctg

SEQ ID NO: 52672 - DNA, 22 bp, synthetic construct
  misc_feature 1..22: note = chemically synthesized
  source 1..22: mol_type = other DNA
aaaagctgctttctgcctggtt

SEQ ID NO: 52673 - DNA, 22 bp, synthetic construct
  misc_feature 1..22: note = chemically synthesized
  source 1..22: mol_type = other DNA
ctttctgcctggttgtggcaaa

SEQ ID NO: 52674 - DNA, 22 bp, synthetic construct
  misc_feature 1..22: note = chemically synthesized
  source 1..22: mol_type = other DNA
tctgcctggttgtggcaaaggg

SEQ ID NO: 52675 - DNA, 22 bp, synthetic construct
  misc_feature 1..22: note = chemically synthesized
  source 1..22: mol_type = other DNA
ctgcctggttgtggcaaagggt

SEQ ID NO: 52676 - DNA, 22 bp, synthetic construct
  misc_feature 1..22: note = chemically synthesized
  source 1..22: mol_type = other DNA
tgcctggttgtggcaaagggtg

SEQ ID NO: 52677 - DNA, 22 bp, synthetic construct
  misc_feature 1..22: note = chemically synthesized
  source 1..22: mol_type = other DNA
cctggttgtggcaaagggtggc

SEQ ID NO: 52678 - DNA, 22 bp, synthetic construct
  misc_feature 1..22: note = chemically synthesized
  source 1..22: mol_type = other DNA
gttgtggcaaagggtggccaag

SEQ ID NO: 52679 - DNA, 22 bp, synthetic construct
  misc_feature 1..22: note = chemically synthesized
  source 1..22: mol_type = other DNA
tggcaaagggtggccaagtggg

SEQ ID NO: 52680 - DNA, 22 bp, synthetic construct
  misc_feature 1..22: note = chemically synthesized
  source 1..22: mol_type = other DNA
agctgtgttcccattgcaaggc

SEQ ID NO: 52681 - DNA, 22 bp, synthetic construct
  misc_feature 1..22: note = chemically synthesized
  source 1..22: mol_type = other DNA
tgttcccattgcaaggctactg

SEQ ID NO: 52682 - DNA, 22 bp, synthetic construct
  misc_feature 1..22: note = chemically synthesized
  source 1..22: mol_type = other DNA
ccattgcaaggctactgagcat

SEQ ID NO: 52683 - DNA, 22 bp, synthetic construct
  misc_feature 1..22: note = chemically synthesized
  source 1..22: mol_type = other DNA
caaggctactgagcatcccctg

SEQ ID NO: 52684 - DNA, 22 bp, synthetic construct
  misc_feature 1..22: note = chemically synthesized
  source 1..22: mol_type = other DNA
ctgagcatcccctgtcctgagg

SEQ ID NO: 52685 - DNA, 22 bp, synthetic construct
  misc_feature 1..22: note = chemically synthesized
  source 1..22: mol_type = other DNA
agcatcccctgtcctgaggctc

SEQ ID NO: 52686 - DNA, 22 bp, synthetic construct
  misc_feature 1..22: note = chemically synthesized
  source 1..22: mol_type = other DNA
tcctgaggctccttaggacacc

SEQ ID NO: 52687 - DNA, 22 bp, synthetic construct
  misc_feature 1..22: note = chemically synthesized
  source 1..22: mol_type = other DNA
aggctccttaggacacctggct

SEQ ID NO: 52688 - DNA, 22 bp, synthetic construct
  misc_feature 1..22: note = chemically synthesized
  source 1..22: mol_type = other DNA
cttaggacacctggctgagctt

SEQ ID NO: 52689 - DNA, 22 bp, synthetic construct
  misc_feature 1..22: note = chemically synthesized
  source 1..22: mol_type = other DNA
aggacacctggctgagcttcag

SEQ ID NO: 52690 - DNA, 22 bp, synthetic construct
  misc_feature 1..22: note = chemically synthesized
  source 1..22: mol_type = other DNA
ggacacctggctgagcttcagc

SEQ ID NO: 52691 - DNA, 22 bp, synthetic construct
  misc_feature 1..22: note = chemically synthesized
  source 1..22: mol_type = other DNA
gctgagcttcagcagccctctt

SEQ ID NO: 52692 - DNA, 22 bp, synthetic construct
  misc_feature 1..22: note = chemically synthesized
  source 1..22: mol_type = other DNA
agcttcagcagccctcttccaa

SEQ ID NO: 52693 - DNA, 22 bp, synthetic construct
  misc_feature 1..22: note = chemically synthesized
  source 1..22: mol_type = other DNA
cagcagccctcttccaagcctg

SEQ ID NO: 52694 - DNA, 22 bp, synthetic construct
  misc_feature 1..22: note = chemically synthesized
  source 1..22: mol_type = other DNA
agcagccctcttccaagcctgg

SEQ ID NO: 52695 - DNA, 22 bp, synthetic construct
  misc_feature 1..22: note = chemically synthesized
  source 1..22: mol_type = other DNA
ttccaagcctggagatgccagc

SEQ ID NO: 52696 - DNA, 22 bp, synthetic construct
  misc_feature 1..22: note = chemically synthesized
  source 1..22: mol_type = other DNA
ccaagcctggagatgccagctc

SEQ ID NO: 52697 - DNA, 22 bp, synthetic construct
  misc_feature 1..22: note = chemically synthesized
  source 1..22: mol_type = other DNA
caagcctggagatgccagctcc

SEQ ID NO: 52698 - DNA, 22 bp, synthetic construct
  misc_feature 1..22: note = chemically synthesized
  source 1..22: mol_type = other DNA
gagatgccagctccatctctgg

SEQ ID NO: 52699 - DNA, 22 bp, synthetic construct
  misc_feature 1..22: note = chemically synthesized
  source 1..22: mol_type = other DNA
catctctggcacaaaatgtagt

SEQ ID NO: 52700 - DNA, 22 bp, synthetic construct
  misc_feature 1..22: note = chemically synthesized
  source 1..22: mol_type = other DNA
tggcacaaaatgtagtgatttt

SEQ ID NO: 52701 - DNA, 22 bp, synthetic construct
  misc_feature 1..22: note = chemically synthesized
  source 1..22: mol_type = other DNA
gcacaaaatgtagtgattttca

SEQ ID NO: 52702 - DNA, 22 bp, synthetic construct
  misc_feature 1..22: note = chemically synthesized
  source 1..22: mol_type = other DNA
tcacagggtgagaggccaaaag

SEQ ID NO: 52703 - DNA, 22 bp, synthetic construct
  misc_feature 1..22: note = chemically synthesized
  source 1..22: mol_type = other DNA
cacagggtgagaggccaaaaga

SEQ ID NO: 52704 - DNA, 22 bp, synthetic construct
  misc_feature 1..22: note = chemically synthesized
  source 1..22: mol_type = other DNA
acagggtgagaggccaaaagag

SEQ ID NO: 52705 - DNA, 22 bp, synthetic construct
  misc_feature 1..22: note = chemically synthesized
  source 1..22: mol_type = other DNA
ataaaatgaagatagccaagct

SEQ ID NO: 52706 - DNA, 22 bp, synthetic construct
  misc_feature 1..22: note = chemically synthesized
  source 1..22: mol_type = other DNA
ccatggaattaagcaacaggac

SEQ ID NO: 52707 - DNA, 22 bp, synthetic construct
  misc_feature 1..22: note = chemically synthesized
  source 1..22: mol_type = other DNA
catggaattaagcaacaggaca

SEQ ID NO: 52708 - DNA, 22 bp, synthetic construct
  misc_feature 1..22: note = chemically synthesized
  source 1..22: mol_type = other DNA
agcaacaggacaaccttgacca

SEQ ID NO: 52709 - DNA, 22 bp, synthetic construct
  misc_feature 1..22: note = chemically synthesized
  source 1..22: mol_type = other DNA
gaccactttgaggggtgtggtg

SEQ ID NO: 52710 - DNA, 22 bp, synthetic construct
  misc_feature 1..22: note = chemically synthesized
  source 1..22: mol_type = other DNA
accactttgaggggtgtggtgg

SEQ ID NO: 52711 - DNA, 22 bp, synthetic construct
  misc_feature 1..22: note = chemically synthesized
  source 1..22: mol_type = other DNA
tgaggggtgtggtgggggccac

SEQ ID NO: 52712 - DNA, 22 bp, synthetic construct
  misc_feature 1..22: note = chemically synthesized
  source 1..22: mol_type = other DNA
gaggggtgtggtgggggccaca

SEQ ID NO: 52713 - DNA, 22 bp, synthetic construct
  misc_feature 1..22: note = chemically synthesized
  source 1..22: mol_type = other DNA
aggggtgtggtgggggccacat

SEQ ID NO: 52714 - DNA, 22 bp, synthetic construct
  misc_feature 1..22: note = chemically synthesized
  source 1..22: mol_type = other DNA
aagagtgactagaagagcagtg

SEQ ID NO: 52715 - DNA, 22 bp, synthetic construct
  misc_feature 1..22: note = chemically synthesized
  source 1..22: mol_type = other DNA
gaagagcagtgggggtggcagc

SEQ ID NO: 52716 - DNA, 22 bp, synthetic construct
  misc_feature 1..22: note = chemically synthesized
  source 1..22: mol_type = other DNA
gctctgaaagcagcgagacttc

SEQ ID NO: 52717 - DNA, 22 bp, synthetic construct
  misc_feature 1..22: note = chemically synthesized
  source 1..22: mol_type = other DNA
tgaaagcagcgagacttctagg

SEQ ID NO: 52718 - DNA, 22 bp, synthetic construct
  misc_feature 1..22: note = chemically synthesized
  source 1..22: mol_type = other DNA
aaagcagcgagacttctaggga

SEQ ID NO: 52719 - DNA, 22 bp, synthetic construct
  misc_feature 1..22: note = chemically synthesized
  source 1..22: mol_type = other DNA
ctagggaatacagggtcagggg

SEQ ID NO: 52720 - DNA, 22 bp, synthetic construct
  misc_feature 1..22: note = chemically synthesized
  source 1..22: mol_type = other DNA
tagggaatacagggtcagggga

SEQ ID NO: 52721 - DNA, 22 bp, synthetic construct
  misc_feature 1..22: note = chemically synthesized
  source 1..22: mol_type = other DNA
gggaatacagggtcaggggagg

SEQ ID NO: 52722 - DNA, 22 bp, synthetic construct
  misc_feature 1..22: note = chemically synthesized
  source 1..22: mol_type = other DNA
tgaaagatgacacactgcagag

SEQ ID NO: 52723 - DNA, 22 bp, synthetic construct
  misc_feature 1..22: note = chemically synthesized
  source 1..22: mol_type = other DNA
aaagatgacacactgcagagaa

SEQ ID NO: 52724 - DNA, 22 bp, synthetic construct
  misc_feature 1..22: note = chemically synthesized
  source 1..22: mol_type = other DNA
cagagaacatgtgtttgtatgc

SEQ ID NO: 52725 - DNA, 22 bp, synthetic construct
  misc_feature 1..22: note = chemically synthesized
  source 1..22: mol_type = other DNA
gtatgccgatgacaagtatcca

SEQ ID NO: 52726 - DNA, 22 bp, synthetic construct
  misc_feature 1..22: note = chemically synthesized
  source 1..22: mol_type = other DNA
tatgccgatgacaagtatccag

SEQ ID NO: 52727 - DNA, 22 bp, synthetic construct
  misc_feature 1..22: note = chemically synthesized
  source 1..22: mol_type = other DNA
tcattctcagaaaggcctgtcc

SEQ ID NO: 52728 - DNA, 22 bp, synthetic construct
  misc_feature 1..22: note = chemically synthesized
  source 1..22: mol_type = other DNA
attctcagaaaggcctgtcctg

SEQ ID NO: 52729 - DNA, 22 bp, synthetic construct
  misc_feature 1..22: note = chemically synthesized
  source 1..22: mol_type = other DNA
tcagaaaggcctgtcctgacct

SEQ ID NO: 52730 - DNA, 22 bp, synthetic construct
  misc_feature 1..22: note = chemically synthesized
  source 1..22: mol_type = other DNA
agaaaggcctgtcctgacctcc

SEQ ID NO: 52731 - DNA, 22 bp, synthetic construct
  misc_feature 1..22: note = chemically synthesized
  source 1..22: mol_type = other DNA
tcctgacctcctgagagtacac

SEQ ID NO: 52732 - DNA, 22 bp, synthetic construct
  misc_feature 1..22: note = chemically synthesized
  source 1..22: mol_type = other DNA
acctcctgagagtacacagacc

SEQ ID NO: 52733 - DNA, 22 bp, synthetic construct
  misc_feature 1..22: note = chemically synthesized
  source 1..22: mol_type = other DNA
ctgagagtacacagaccatgag

SEQ ID NO: 52734 - DNA, 22 bp, synthetic construct
  misc_feature 1..22: note = chemically synthesized
  source 1..22: mol_type = other DNA
agagtacacagaccatgagggc

SEQ ID NO: 52735 - DNA, 22 bp, synthetic construct
  misc_feature 1..22: note = chemically synthesized
  source 1..22: mol_type = other DNA
actgtttcatgcaaagtccttg

SEQ ID NO: 52736 - DNA, 22 bp, synthetic construct
  misc_feature 1..22: note = chemically synthesized
  source 1..22: mol_type = other DNA
tttcatgcaaagtccttggcca

SEQ ID NO: 52737 - DNA, 22 bp, synthetic construct
  misc_feature 1..22: note = chemically synthesized
  source 1..22: mol_type = other DNA
catgcaaagtccttggccacag

SEQ ID NO: 52738 - DNA, 22 bp, synthetic construct
  misc_feature 1..22: note = chemically synthesized
  source 1..22: mol_type = other DNA
atgcaaagtccttggccacagt

SEQ ID NO: 52739 - DNA, 22 bp, synthetic construct
  misc_feature 1..22: note = chemically synthesized
  source 1..22: mol_type = other DNA
ggccacagtccacctgctcccc

SEQ ID NO: 52740 - DNA, 22 bp, synthetic construct
  misc_feature 1..22: note = chemically synthesized
  source 1..22: mol_type = other DNA
gccacagtccacctgctcccca

SEQ ID NO: 52741 - DNA, 22 bp, synthetic construct
  misc_feature 1..22: note = chemically synthesized
  source 1..22: mol_type = other DNA
ctccccacctctgtgactttgt

SEQ ID NO: 52742 - DNA, 22 bp, synthetic construct
  misc_feature 1..22: note = chemically synthesized
  source 1..22: mol_type = other DNA
cccacctctgtgactttgtcct

SEQ ID NO: 52743 - DNA, 22 bp, synthetic construct
  misc_feature 1..22: note = chemically synthesized
  source 1..22: mol_type = other DNA
tgtgactttgtccttcctcaat

SEQ ID NO: 52744 - DNA, 22 bp, synthetic construct
  misc_feature 1..22: note = chemically synthesized
  source 1..22: mol_type = other DNA
tgactttgtccttcctcaattt

SEQ ID NO: 52745 - DNA, 22 bp, synthetic construct
  misc_feature 1..22: note = chemically synthesized
  source 1..22: mol_type = other DNA
tgtccttcctcaatttaatatg

SEQ ID NO: 52746 - DNA, 22 bp, synthetic construct
  misc_feature 1..22: note = chemically synthesized
  source 1..22: mol_type = other DNA
gtccttcctcaatttaatatgc

SEQ ID NO: 52747 - DNA, 22 bp, synthetic construct
  misc_feature 1..22: note = chemically synthesized
  source 1..22: mol_type = other DNA
tccttcctcaatttaatatgct

SEQ ID NO: 52748 - DNA, 22 bp, synthetic construct
  misc_feature 1..22: note = chemically synthesized
  source 1..22: mol_type = other DNA
cctcaatttaatatgctctatg

SEQ ID NO: 52749 - DNA, 22 bp, synthetic construct
  misc_feature 1..22: note = chemically synthesized
  source 1..22: mol_type = other DNA
ctcaatttaatatgctctatgc

SEQ ID NO: 52750 - DNA, 22 bp, synthetic construct
  misc_feature 1..22: note = chemically synthesized
  source 1..22: mol_type = other DNA
aatttaatatgctctatgctgg

SEQ ID NO: 52751 - DNA, 22 bp, synthetic construct
  misc_feature 1..22: note = chemically synthesized
  source 1..22: mol_type = other DNA
aatatgctctatgctggaaaac

SEQ ID NO: 52752 - DNA, 22 bp, synthetic construct
  misc_feature 1..22: note = chemically synthesized
  source 1..22: mol_type = other DNA
atatgctctatgctggaaaact

SEQ ID NO: 52753 - DNA, 22 bp, synthetic construct
  misc_feature 1..22: note = chemically synthesized
  source 1..22: mol_type = other DNA
tatgctggaaaactggattatt

SEQ ID NO: 52754 - DNA, 22 bp, synthetic construct
  misc_feature 1..22: note = chemically synthesized
  source 1..22: mol_type = other DNA
tgctggaaaactggattattga

SEQ ID NO: 52755 - DNA, 22 bp, synthetic construct
  misc_feature 1..22: note = chemically synthesized
  source 1..22: mol_type = other DNA
gaaaactggattattgaacagg

SEQ ID NO: 52756 - DNA, 22 bp, synthetic construct
  misc_feature 1..22: note = chemically synthesized
  source 1..22: mol_type = other DNA
gattattgaacaggcattggct

SEQ ID NO: 52757 - DNA, 22 bp, synthetic construct
  misc_feature 1..22: note = chemically synthesized
  source 1..22: mol_type = other DNA
ttgaacaggcattggctgatgc

SEQ ID NO: 52758 - DNA, 22 bp, synthetic construct
  misc_feature 1..22: note = chemically synthesized
  source 1..22: mol_type = other DNA
aacaggcattggctgatgcatt

SEQ ID NO: 52759 - DNA, 22 bp, synthetic construct
  misc_feature 1..22: note = chemically synthesized
  source 1..22: mol_type = other DNA
gctgatgcattctgaacctaat

SEQ ID NO: 52760 - DNA, 22 bp, synthetic construct
  misc_feature 1..22: note = chemically synthesized
  source 1..22: mol_type = other DNA
atgcattctgaacctaatccac

SEQ ID NO: 52761 - DNA, 22 bp, synthetic construct
  misc_feature 1..22: note = chemically synthesized
  source 1..22: mol_type = other DNA
tgaacctaatccactaaaaagc

SEQ ID NO: 52762 - DNA, 22 bp, synthetic construct
  misc_feature 1..22: note = chemically synthesized
  source 1..22: mol_type = other DNA
aacctaatccactaaaaagcac

SEQ ID NO: 52763 - DNA, 22 bp, synthetic construct
  misc_feature 1..22: note = chemically synthesized
  source 1..22: mol_type = other DNA
atccactaaaaagcacttgata

SEQ ID NO: 52764 - DNA, 22 bp, synthetic construct
  misc_feature 1..22: note = chemically synthesized
  source 1..22: mol_type = other DNA
aaaagcacttgatagatatatc

SEQ ID NO: 52765 - DNA, 22 bp, synthetic construct
  misc_feature 1..22: note = chemically synthesized
  source 1..22: mol_type = other DNA
gatagatatatcaaaatatcat

SEQ ID NO: 52766 - DNA, 22 bp, synthetic construct
  misc_feature 1..22: note = chemically synthesized
  source 1..22: mol_type = other DNA
atagatatatcaaaatatcatt

SEQ ID NO: 52767 - DNA, 22 bp, synthetic construct
  misc_feature 1..22: note = chemically synthesized
  source 1..22: mol_type = other DNA
agaaatagatattttaggccca

SEQ ID NO: 52768 - DNA, 22 bp, synthetic construct
  misc_feature 1..22: note = chemically synthesized
  source 1..22: mol_type = other DNA
taggcccatatccatgtcttca

SEQ ID NO: 52769 - DNA, 22 bp, synthetic construct
  misc_feature 1..22: note = chemically synthesized
  source 1..22: mol_type = other DNA
aggcccatatccatgtcttcac

SEQ ID NO: 52770 - DNA, 22 bp, synthetic construct
  misc_feature 1..22: note = chemically synthesized
  source 1..22: mol_type = other DNA
ggcccatatccatgtcttcacc

SEQ ID NO: 52771 - DNA, 22 bp, synthetic construct
  misc_feature 1..22: note = chemically synthesized
  source 1..22: mol_type = other DNA
caccccgcactgtttctcattt

SEQ ID NO: 52772 - DNA, 22 bp, synthetic construct
  misc_feature 1..22: note = chemically synthesized
  source 1..22: mol_type = other DNA
accccgcactgtttctcatttg

SEQ ID NO: 52773 - DNA, 22 bp, synthetic construct
  misc_feature 1..22: note = chemically synthesized
  source 1..22: mol_type = other DNA
tttctcatttgaactctctttt

SEQ ID NO: 52774 - DNA, 22 bp, synthetic construct
  misc_feature 1..22: note = chemically synthesized
  source 1..22: mol_type = other DNA
ctcatttgaactctcttttcca

SEQ ID NO: 52775 - DNA, 22 bp, synthetic construct
  misc_feature 1..22: note = chemically synthesized
  source 1..22: mol_type = other DNA
tcatttgaactctcttttccag

SEQ ID NO: 52776 - DNA, 22 bp, synthetic construct
  misc_feature 1..22: note = chemically synthesized
  source 1..22: mol_type = other DNA
atttgaactctcttttccagga

SEQ ID NO: 52777 - DNA, 22 bp, synthetic construct
  misc_feature 1..22: note = chemically synthesized
  source 1..22: mol_type = other DNA
gaactctcttttccaggaagag

SEQ ID NO: 52778 - DNA, 22 bp, synthetic construct
  misc_feature 1..22: note = chemically synthesized
  source 1..22: mol_type = other DNA
aactctcttttccaggaagagt

SEQ ID NO: 52779 - DNA, 22 bp, synthetic construct
  misc_feature 1..22: note = chemically synthesized
  source 1..22: mol_type = other DNA
tcttttccaggaagagttgtgc

SEQ ID NO: 52780 - DNA, 22 bp, synthetic construct
  misc_feature 1..22: note = chemically synthesized
  source 1..22: mol_type = other DNA
ttttccaggaagagttgtgctt

SEQ ID NO: 52781 - DNA, 22 bp, synthetic construct
  misc_feature 1..22: note = chemically synthesized
  source 1..22: mol_type = other DNA
ttccaggaagagttgtgcttgg

SEQ ID NO: 52782 - DNA, 22 bp, synthetic construct
  misc_feature 1..22: note = chemically synthesized
  source 1..22: mol_type = other DNA
tccaggaagagttgtgcttggg

SEQ ID NO: 52783 - DNA, 22 bp, synthetic construct
  misc_feature 1..22: note = chemically synthesized
  source 1..22: mol_type = other DNA
ccaggaagagttgtgcttgggt

SEQ ID NO: 52784 - DNA, 22 bp, synthetic construct
  misc_feature 1..22: note = chemically synthesized
  source 1..22: mol_type = other DNA
caggaagagttgtgcttgggta

SEQ ID NO: 52785 - DNA, 22 bp, synthetic construct
  misc_feature 1..22: note = chemically synthesized
  source 1..22: mol_type = other DNA
tgcttgggtaaattctatagct

SEQ ID NO: 52786 - DNA, 22 bp, synthetic construct
  misc_feature 1..22: note = chemically synthesized
  source 1..22: mol_type = other DNA
gggtaaattctatagctcacag

SEQ ID NO: 52787 - DNA, 22 bp, synthetic construct
  misc_feature 1..22: note = chemically synthesized
  source 1..22: mol_type = other DNA
ggtaaattctatagctcacagt

SEQ ID NO: 52788 - DNA, 22 bp, synthetic construct
  misc_feature 1..22: note = chemically synthesized
  source 1..22: mol_type = other DNA
tatagctcacagtgtgacttca

SEQ ID NO: 52789 - DNA, 22 bp, synthetic construct
  misc_feature 1..22: note = chemically synthesized
  source 1..22: mol_type = other DNA
tagctcacagtgtgacttcaaa

SEQ ID NO: 52790 - DNA, 22 bp, synthetic construct
  misc_feature 1..22: note = chemically synthesized
  source 1..22: mol_type = other DNA
acagtgtgacttcaaaacacac

SEQ ID NO: 52791 - DNA, 22 bp, synthetic construct
  misc_feature 1..22: note = chemically synthesized
  source 1..22: mol_type = other DNA
caaaacacacaataaattaata

SEQ ID NO: 52792 - DNA, 22 bp, synthetic construct
  misc_feature 1..22: note = chemically synthesized
  source 1..22: mol_type = other DNA
aaaacacacaataaattaataa

SEQ ID NO: 52793 - DNA, 22 bp, synthetic construct
  misc_feature 1..22: note = chemically synthesized
  source 1..22: mol_type = other DNA
ataaggtgcttcctacagtgag

SEQ ID NO: 52794 - DNA, 22 bp, synthetic construct
  misc_feature 1..22: note = chemically synthesized
  source 1..22: mol_type = other DNA
cctacagtgagttcagttaaac

SEQ ID NO: 52795 - DNA, 22 bp, synthetic construct
  misc_feature 1..22: note = chemically synthesized
  source 1..22: mol_type = other DNA
ctacagtgagttcagttaaaca

SEQ ID NO: 52796 - DNA, 22 bp, synthetic construct
  misc_feature 1..22: note = chemically synthesized
  source 1..22: mol_type = other DNA
cagtgagttcagttaaacattt

SEQ ID NO: 52797 - DNA, 22 bp, synthetic construct
  misc_feature 1..22: note = chemically synthesized
  source 1..22: mol_type = other DNA
agttaaacattttgaagagtgt

SEQ ID NO: 52798 - DNA, 22 bp, synthetic construct
  misc_feature 1..22: note = chemically synthesized
  source 1..22: mol_type = other DNA
aacattttgaagagtgtttttg

SEQ ID NO: 52799 - DNA, 22 bp, synthetic construct
  misc_feature 1..22: note = chemically synthesized
  source 1..22: mol_type = other DNA
tgaagagtgtttttgaaatgta

SEQ ID NO: 52800 - DNA, 22 bp, synthetic construct
  misc_feature 1..22: note = chemically synthesized
  source 1..22: mol_type = other DNA
gaagagtgtttttgaaatgtag

SEQ ID NO: 52801 - DNA, 22 bp, synthetic construct
  misc_feature 1..22: note = chemically synthesized
  source 1..22: mol_type = other DNA
aagagtgtttttgaaatgtagc

SEQ ID NO: 52802 - DNA, 22 bp, synthetic construct
  misc_feature 1..22: note = chemically synthesized
  source 1..22: mol_type = other DNA
ttgaaatgtagcagagcaggct

SEQ ID NO: 52803 - DNA, 22 bp, synthetic construct
  misc_feature 1..22: note = chemically synthesized
  source 1..22: mol_type = other DNA
tgaaatgtagcagagcaggcta

SEQ ID NO: 52804 - DNA, 22 bp, synthetic construct
  misc_feature 1..22: note = chemically synthesized
  source 1..22: mol_type = other DNA
gaaatgtagcagagcaggctac

SEQ ID NO: 52805 - DNA, 22 bp, synthetic construct
  misc_feature 1..22: note = chemically synthesized
  source 1..22: mol_type = other DNA
aaatgtagcagagcaggctaca

SEQ ID NO: 52806 - DNA, 22 bp, synthetic construct
  misc_feature 1..22: note = chemically synthesized
  source 1..22: mol_type = other DNA
caattgatattcaaaaagagga

SEQ ID NO: 52807 - DNA, 22 bp, synthetic construct
  misc_feature 1..22: note = chemically synthesized
  source 1..22: mol_type = other DNA
atattcaaaaagaggaaacttc

SEQ ID NO: 52808 - DNA, 22 bp, synthetic construct
  misc_feature 1..22: note = chemically synthesized
  source 1..22: mol_type = other DNA
aaaaagaggaaacttccattta

SEQ ID NO: 52809 - DNA, 22 bp, synthetic construct
  misc_feature 1..22: note = chemically synthesized
  source 1..22: mol_type = other DNA
ccatttatttccccctttaact

SEQ ID NO: 52810 - DNA, 22 bp, synthetic construct
  misc_feature 1..22: note = chemically synthesized
  source 1..22: mol_type = other DNA
catttatttccccctttaacta

SEQ ID NO: 52811 - DNA, 22 bp, synthetic construct
  misc_feature 1..22: note = chemically synthesized
  source 1..22: mol_type = other DNA
atttccccctttaactaagtta

SEQ ID NO: 52812 - DNA, 22 bp, synthetic construct
  misc_feature 1..22: note = chemically synthesized
  source 1..22: mol_type = other DNA
tttccccctttaactaagttac

SEQ ID NO: 52813 - DNA, 22 bp, synthetic construct
  misc_feature 1..22: note = chemically synthesized
  source 1..22: mol_type = other DNA
ccccctttaactaagttacctg

SEQ ID NO: 52814 - DNA, 22 bp, synthetic construct
  misc_feature 1..22: note = chemically synthesized
  source 1..22: mol_type = other DNA
cccctttaactaagttacctgt

SEQ ID NO: 52815 - DNA, 22 bp, synthetic construct
  misc_feature 1..22: note = chemically synthesized
  source 1..22: mol_type = other DNA
taactaagttacctgtaactgt

SEQ ID NO: 52816 - DNA, 22 bp, synthetic construct
  misc_feature 1..22: note = chemically synthesized
  source 1..22: mol_type = other DNA
aactaagttacctgtaactgtg

SEQ ID NO: 52817 - DNA, 22 bp, synthetic construct
  misc_feature 1..22: note = chemically synthesized
  source 1..22: mol_type = other DNA
actaagttacctgtaactgtgt

SEQ ID NO: 52818 - DNA, 22 bp, synthetic construct
  misc_feature 1..22: note = chemically synthesized
  source 1..22: mol_type = other DNA
agttacctgtaactgtgtcatt

SEQ ID NO: 52819 - DNA, 22 bp, synthetic construct
  misc_feature 1..22: note = chemically synthesized
  source 1..22: mol_type = other DNA
cctgtaactgtgtcattttatt

SEQ ID NO: 52820 - DNA, 22 bp, synthetic construct
  misc_feature 1..22: note = chemically synthesized
  source 1..22: mol_type = other DNA
taactgtgtcattttattatgc

SEQ ID NO: 52821 - DNA, 22 bp, synthetic construct
  misc_feature 1..22: note = chemically synthesized
  source 1..22: mol_type = other DNA
tgtcattttattatgcttcata

SEQ ID NO: 52822 - DNA, 22 bp, synthetic construct
  misc_feature 1..22: note = chemically synthesized
  source 1..22: mol_type = other DNA
tattatgcttcatagagcatca

SEQ ID NO: 52823 - DNA, 22 bp, synthetic construct
  misc_feature 1..22: note = chemically synthesized
  source 1..22: mol_type = other DNA
attatgcttcatagagcatcac

SEQ ID NO: 52824 - DNA, 22 bp, synthetic construct
  misc_feature 1..22: note = chemically synthesized
  source 1..22: mol_type = other DNA
ttatgcttcatagagcatcact

SEQ ID NO: 52825 - DNA, 22 bp, synthetic construct
  misc_feature 1..22: note = chemically synthesized
  source 1..22: mol_type = other DNA
tgcttcatagagcatcactgct

SEQ ID NO: 52826 - DNA, 22 bp, synthetic construct
  misc_feature 1..22: note = chemically synthesized
  source 1..22: mol_type = other DNA
catagagcatcactgctgagat

SEQ ID NO: 52827 - DNA, 22 bp, synthetic construct
  misc_feature 1..22: note = chemically synthesized
  source 1..22: mol_type = other DNA
atagagcatcactgctgagatc

SEQ ID NO: 52828 - DNA, 22 bp, synthetic construct
  misc_feature 1..22: note = chemically synthesized
  source 1..22: mol_type = other DNA
ctgagatcccctccccagctca

SEQ ID NO: 52829 - DNA, 22 bp, synthetic construct
  misc_feature 1..22: note = chemically synthesized
  source 1..22: mol_type = other DNA
agatcccctccccagctcatgt

SEQ ID NO: 52830 - DNA, 22 bp, synthetic construct
  misc_feature 1..22: note = chemically synthesized
  source 1..22: mol_type = other DNA
cccagctcatgttgctaggaaa

SEQ ID NO: 52831 - DNA, 22 bp, synthetic construct
  misc_feature 1..22: note = chemically synthesized
  source 1..22: mol_type = other DNA
atgttgctaggaaatatcccaa

SEQ ID NO: 52832 - DNA, 22 bp, synthetic construct
  misc_feature 1..22: note = chemically synthesized
  source 1..22: mol_type = other DNA
ctaggaaatatcccaaaacaga

SEQ ID NO: 52833 - DNA, 22 bp, synthetic construct
  misc_feature 1..22: note = chemically synthesized
  source 1..22: mol_type = other DNA
ggaaatatcccaaaacagaatc

SEQ ID NO: 52834 - DNA, 22 bp, synthetic construct
  misc_feature 1..22: note = chemically synthesized
  source 1..22: mol_type = other DNA
ttctttttttaacctgatgatt

SEQ ID NO: 52835 - DNA, 22 bp, synthetic construct
  misc_feature 1..22: note = chemically synthesized
  source 1..22: mol_type = other DNA
tctttttttaacctgatgattt

SEQ ID NO: 52836 - DNA, 22 bp, synthetic construct
  misc_feature 1..22: note = chemically synthesized
  source 1..22: mol_type = other DNA
ctttttttaacctgatgatttt

SEQ ID NO: 52837 - DNA, 22 bp, synthetic construct
  misc_feature 1..22: note = chemically synthesized
  source 1..22: mol_type = other DNA
tttttttaacctgatgattttt

SEQ ID NO: 52838 - DNA, 22 bp, synthetic construct
  misc_feature 1..22: note = chemically synthesized
  source 1..22: mol_type = other DNA
tttttaacctgatgatttttcc

SEQ ID NO: 52839 - DNA, 22 bp, synthetic construct
  misc_feature 1..22: note = chemically synthesized
  source 1..22: mol_type = other DNA
ttttaacctgatgatttttcca

SEQ ID NO: 52840 - DNA, 22 bp, synthetic construct
  misc_feature 1..22: note = chemically synthesized
  source 1..22: mol_type = other DNA
tttaacctgatgatttttccac

SEQ ID NO: 52841 - DNA, 22 bp, synthetic construct
  misc_feature 1..22: note = chemically synthesized
  source 1..22: mol_type = other DNA
ttaacctgatgatttttccaca

SEQ ID NO: 52842 - DNA, 22 bp, synthetic construct
  misc_feature 1..22: note = chemically synthesized
  source 1..22: mol_type = other DNA
taacctgatgatttttccacaa

SEQ ID NO: 52843 - DNA, 22 bp, synthetic construct
  misc_feature 1..22: note = chemically synthesized
  source 1..22: mol_type = other DNA
aacctgatgatttttccacaat

SEQ ID NO: 52844 - DNA, 22 bp, synthetic construct
  misc_feature 1..22: note = chemically synthesized
  source 1..22: mol_type = other DNA
acctgatgatttttccacaatc

SEQ ID NO: 52845 - DNA, 22 bp, synthetic construct
  misc_feature 1..22: note = chemically synthesized
  source 1..22: mol_type = other DNA
atgatttttccacaatcctttt

SEQ ID NO: 52846 - DNA, 22 bp, synthetic construct
  misc_feature 1..22: note = chemically synthesized
  source 1..22: mol_type = other DNA
ttccacaatccttttgtttctc

SEQ ID NO: 52847 - DNA, 22 bp, synthetic construct
  misc_feature 1..22: note = chemically synthesized
  source 1..22: mol_type = other DNA
tccacaatccttttgtttctct

SEQ ID NO: 52848 - DNA, 22 bp, synthetic construct
  misc_feature 1..22: note = chemically synthesized
  source 1..22: mol_type = other DNA
ccacaatccttttgtttctctg

SEQ ID NO: 52849 - DNA, 22 bp, synthetic construct
  misc_feature 1..22: note = chemically synthesized
  source 1..22: mol_type = other DNA
cacaatccttttgtttctctga

SEQ ID NO: 52850 - DNA, 22 bp, synthetic construct
  misc_feature 1..22: note = chemically synthesized
  source 1..22: mol_type = other DNA
ttgtttctctgattcacctcca

SEQ ID NO: 52851 - DNA, 22 bp, synthetic construct
  misc_feature 1..22: note = chemically synthesized
  source 1..22: mol_type = other DNA
tgtttctctgattcacctccag

SEQ ID NO: 52852 - DNA, 22 bp, synthetic construct
  misc_feature 1..22: note = chemically synthesized
  source 1..22: mol_type = other DNA
gtttctctgattcacctccagg

SEQ ID NO: 52853 - DNA, 22 bp, synthetic construct
  misc_feature 1..22: note = chemically synthesized
  source 1..22: mol_type = other DNA
tttctctgattcacctccaggg

SEQ ID NO: 52854 - DNA, 22 bp, synthetic construct
  misc_feature 1..22: note = chemically synthesized
  source 1..22: mol_type = other DNA
ctctgattcacctccagggctc

SEQ ID NO: 52855 - DNA, 22 bp, synthetic construct
  misc_feature 1..22: note = chemically synthesized
  source 1..22: mol_type = other DNA
tctgattcacctccagggctca

SEQ ID NO: 52856 - DNA, 22 bp, synthetic construct
  misc_feature 1..22: note = chemically synthesized
  source 1..22: mol_type = other DNA
tgattcacctccagggctcata

SEQ ID NO: 52857 - DNA, 22 bp, synthetic construct
  misc_feature 1..22: note = chemically synthesized
  source 1..22: mol_type = other DNA
attcacctccagggctcatatg

SEQ ID NO: 52858 - DNA, 22 bp, synthetic construct
  misc_feature 1..22: note = chemically synthesized
  source 1..22: mol_type = other DNA
acctccagggctcatatggcaa

SEQ ID NO: 52859 - DNA, 22 bp, synthetic construct
  misc_feature 1..22: note = chemically synthesized
  source 1..22: mol_type = other DNA
cagggctcatatggcaatgggg

SEQ ID NO: 52860 - DNA, 22 bp, synthetic construct
  misc_feature 1..22: note = chemically synthesized
  source 1..22: mol_type = other DNA
atatggcaatggggatttaata

SEQ ID NO: 52861 - DNA, 22 bp, synthetic construct
  misc_feature 1..22: note = chemically synthesized
  source 1..22: mol_type = other DNA
aatagggtttatttgttggtga

SEQ ID NO: 52862 - DNA, 22 bp, synthetic construct
  misc_feature 1..22: note = chemically synthesized
  source 1..22: mol_type = other DNA
atagggtttatttgttggtgaa

SEQ ID NO: 52863 - DNA, 22 bp, synthetic construct
  misc_feature 1..22: note = chemically synthesized
  source 1..22: mol_type = other DNA
atttgttggtgaagaaacatta

SEQ ID NO: 52864 - DNA, 22 bp, synthetic construct
  misc_feature 1..22: note = chemically synthesized
  source 1..22: mol_type = other DNA
tttgttggtgaagaaacattaa

SEQ ID NO: 52865 - DNA, 22 bp, synthetic construct
  misc_feature 1..22: note = chemically synthesized
  source 1..22: mol_type = other DNA
gttggtgaagaaacattaaaca

SEQ ID NO: 52866 - DNA, 22 bp, synthetic construct
  misc_feature 1..22: note = chemically synthesized
  source 1..22: mol_type = other DNA
ttggtgaagaaacattaaacaa

SEQ ID NO: 52867 - DNA, 22 bp, synthetic construct
  misc_feature 1..22: note = chemically synthesized
  source 1..22: mol_type = other DNA
gtgaagaaacattaaacaaatc

SEQ ID NO: 52868 - DNA, 22 bp, synthetic construct
  misc_feature 1..22: note = chemically synthesized
  source 1..22: mol_type = other DNA
aacaaatcttttaataggaaaa

SEQ ID NO: 52869 - DNA, 22 bp, synthetic construct
  misc_feature 1..22: note = chemically synthesized
  source 1..22: mol_type = other DNA
ttaataggaaaaatacttttat

SEQ ID NO: 52870 - DNA, 22 bp, synthetic construct
  misc_feature 1..22: note = chemically synthesized
  source 1..22: mol_type = other DNA
taataggaaaaatacttttata

SEQ ID NO: 52871 - DNA, 22 bp, synthetic construct
  misc_feature 1..22: note = chemically synthesized
  source 1..22: mol_type = other DNA
aataggaaaaatacttttatat

SEQ ID NO: 52872 - DNA, 22 bp, synthetic construct
  misc_feature 1..22: note = chemically synthesized
  source 1..22: mol_type = other DNA
ataggaaaaatacttttatatt

SEQ ID NO: 52873 - DNA, 22 bp, synthetic construct
  misc_feature 1..22: note = chemically synthesized
  source 1..22: mol_type = other DNA
ttatattataggcaaaatgtag

SEQ ID NO: 52874 - DNA, 22 bp, synthetic construct
  misc_feature 1..22: note = chemically synthesized
  source 1..22: mol_type = other DNA
tatattataggcaaaatgtaga

SEQ ID NO: 52875 - DNA, 22 bp, synthetic construct
  misc_feature 1..22: note = chemically synthesized
  source 1..22: mol_type = other DNA
atattataggcaaaatgtagat

SEQ ID NO: 52876 - DNA, 22 bp, synthetic construct
  misc_feature 1..22: note = chemically synthesized
  source 1..22: mol_type = other DNA
tattataggcaaaatgtagatg

SEQ ID NO: 52877 - DNA, 22 bp, synthetic construct
  misc_feature 1..22: note = chemically synthesized
  source 1..22: mol_type = other DNA
taggcaaaatgtagatgtatat

SEQ ID NO: 52878 - DNA, 22 bp, synthetic construct
  misc_feature 1..22: note = chemically synthesized
  source 1..22: mol_type = other DNA
ctactgaagtaaatgtatttta

SEQ ID NO: 52879 - DNA, 22 bp, synthetic construct
  misc_feature 1..22: note = chemically synthesized
  source 1..22: mol_type = other DNA
ctgaagtaaatgtattttatta

SEQ ID NO: 52880 - DNA, 22 bp, synthetic construct
  misc_feature 1..22: note = chemically synthesized
  source 1..22: mol_type = other DNA
aagtaaatgtattttattaatg

SEQ ID NO: 52881 - DNA, 22 bp, synthetic construct
  misc_feature 1..22: note = chemically synthesized
  source 1..22: mol_type = other DNA
tattaatggtgtgagaatttct

SEQ ID NO: 52882 - DNA, 22 bp, synthetic construct
  misc_feature 1..22: note = chemically synthesized
  source 1..22: mol_type = other DNA
attaatggtgtgagaatttctt

SEQ ID NO: 52883 - DNA, 22 bp, synthetic construct
  misc_feature 1..22: note = chemically synthesized
  source 1..22: mol_type = other DNA
ttaatggtgtgagaatttcttc

SEQ ID NO: 52884 - DNA, 22 bp, synthetic construct
  misc_feature 1..22: note = chemically synthesized
  source 1..22: mol_type = other DNA
atggtgtgagaatttcttcctc

SEQ ID NO: 52885 - DNA, 22 bp, synthetic construct
  misc_feature 1..22: note = chemically synthesized
  source 1..22: mol_type = other DNA
cttcctcactgtggtgtgtgaa

SEQ ID NO: 52886 - DNA, 22 bp, synthetic construct
  misc_feature 1..22: note = chemically synthesized
  source 1..22: mol_type = other DNA
ttcctcactgtggtgtgtgaat

SEQ ID NO: 52887 - DNA, 22 bp, synthetic construct
  misc_feature 1..22: note = chemically synthesized
  source 1..22: mol_type = other DNA
cctcactgtggtgtgtgaatgt

SEQ ID NO: 52888 - DNA, 22 bp, synthetic construct
  misc_feature 1..22: note = chemically synthesized
  source 1..22: mol_type = other DNA
ctcactgtggtgtgtgaatgtg

SEQ ID NO: 52889 - DNA, 22 bp, synthetic construct
  misc_feature 1..22: note = chemically synthesized
  source 1..22: mol_type = other DNA
actgtggtgtgtgaatgtgtat

SEQ ID NO: 52890 - DNA, 22 bp, synthetic construct
  misc_feature 1..22: note = chemically synthesized
  source 1..22: mol_type = other DNA
tggtgtgtgaatgtgtatgcat

SEQ ID NO: 52891 - DNA, 22 bp, synthetic construct
  misc_feature 1..22: note = chemically synthesized
  source 1..22: mol_type = other DNA
gcatgtgtaaaagacttagcaa

SEQ ID NO: 52892 - DNA, 22 bp, synthetic construct
  misc_feature 1..22: note = chemically synthesized
  source 1..22: mol_type = other DNA
catgtgtaaaagacttagcaat

SEQ ID NO: 52893 - DNA, 22 bp, synthetic construct
  misc_feature 1..22: note = chemically synthesized
  source 1..22: mol_type = other DNA
agcaatttgtgaatagaagatg

SEQ ID NO: 52894 - DNA, 22 bp, synthetic construct
  misc_feature 1..22: note = chemically synthesized
  source 1..22: mol_type = other DNA
gcaatttgtgaatagaagatgt

SEQ ID NO: 52895 - DNA, 22 bp, synthetic construct
  misc_feature 1..22: note = chemically synthesized
  source 1..22: mol_type = other DNA
gtgaatagaagatgtttctccg

SEQ ID NO: 52896 - DNA, 22 bp, synthetic construct
  misc_feature 1..22: note = chemically synthesized
  source 1..22: mol_type = other DNA
tgaatagaagatgtttctccgc

SEQ ID NO: 52897 - DNA, 22 bp, synthetic construct
  misc_feature 1..22: note = chemically synthesized
  source 1..22: mol_type = other DNA
ctccgcttctcactgagcatgg

SEQ ID NO: 52898 - DNA, 22 bp, synthetic construct
  misc_feature 1..22: note = chemically synthesized
  source 1..22: mol_type = other DNA
tccgcttctcactgagcatggc

SEQ ID NO: 52899 - DNA, 22 bp, synthetic construct
  misc_feature 1..22: note = chemically synthesized
  source 1..22: mol_type = other DNA
cgcttctcactgagcatggctg

SEQ ID NO: 52900 - DNA, 22 bp, synthetic construct
  misc_feature 1..22: note = chemically synthesized
  source 1..22: mol_type = other DNA
ctcactgagcatggctgtaaaa

SEQ ID NO: 52901 - DNA, 22 bp, synthetic construct
  misc_feature 1..22: note = chemically synthesized
  source 1..22: mol_type = other DNA
tcactgagcatggctgtaaaag

SEQ ID NO: 52902 - DNA, 22 bp, synthetic construct
  misc_feature 1..22: note = chemically synthesized
  source 1..22: mol_type = other DNA
actgagcatggctgtaaaagaa

SEQ ID NO: 52903 - DNA, 22 bp, synthetic construct
  misc_feature 1..22: note = chemically synthesized
  source 1..22: mol_type = other DNA
agcatggctgtaaaagaaactt

SEQ ID NO: 52904 - DNA, 22 bp, synthetic construct
  misc_feature 1..22: note = chemically synthesized
  source 1..22: mol_type = other DNA
taaaagaaactttttcctctcc

SEQ ID NO: 52905 - DNA, 22 bp, synthetic construct
  misc_feature 1..22: note = chemically synthesized
  source 1..22: mol_type = other DNA
tttcctctccccgggcattcca

SEQ ID NO: 52906 - DNA, 22 bp, synthetic construct
  misc_feature 1..22: note = chemically synthesized
  source 1..22: mol_type = other DNA
ttcctctccccgggcattccag

SEQ ID NO: 52907 - DNA, 22 bp, synthetic construct
  misc_feature 1..22: note = chemically synthesized
  source 1..22: mol_type = other DNA
tcctctccccgggcattccagc

SEQ ID NO: 52908 - DNA, 22 bp, synthetic construct
  misc_feature 1..22: note = chemically synthesized
  source 1..22: mol_type = other DNA
cctctccccgggcattccagca

SEQ ID NO: 52909 - DNA, 22 bp, synthetic construct
  misc_feature 1..22: note = chemically synthesized
  source 1..22: mol_type = other DNA
ctctccccgggcattccagcac

SEQ ID NO: 52910 - DNA, 22 bp, synthetic construct
  misc_feature 1..22: note = chemically synthesized
  source 1..22: mol_type = other DNA
tccccgggcattccagcacaca

SEQ ID NO: 52911 - DNA, 22 bp, synthetic construct
  misc_feature 1..22: note = chemically synthesized
  source 1..22: mol_type = other DNA
cccgggcattccagcacacatt

SEQ ID NO: 52912 - DNA, 22 bp, synthetic construct
  misc_feature 1..22: note = chemically synthesized
  source 1..22: mol_type = other DNA
cagcacacattggaaagataac

SEQ ID NO: 52913 - DNA, 22 bp, synthetic construct
  misc_feature 1..22: note = chemically synthesized
  source 1..22: mol_type = other DNA
gaaagataacacgtccacagaa

SEQ ID NO: 52914 - DNA, 22 bp, synthetic construct
  misc_feature 1..22: note = chemically synthesized
  source 1..22: mol_type = other DNA
gctttccaaaagagcttatcag

SEQ ID NO: 52915 - DNA, 22 bp, synthetic construct
  misc_feature 1..22: note = chemically synthesized
  source 1..22: mol_type = other DNA
tccaaaagagcttatcagagaa

SEQ ID NO: 52916 - DNA, 22 bp, synthetic construct
  misc_feature 1..22: note = chemically synthesized
  source 1..22: mol_type = other DNA
ccaaaagagcttatcagagaat

SEQ ID NO: 52917 - DNA, 22 bp, synthetic construct
  misc_feature 1..22: note = chemically synthesized
  source 1..22: mol_type = other DNA
caaaagagcttatcagagaatg

SEQ ID NO: 52918 - DNA, 22 bp, synthetic construct
  misc_feature 1..22: note = chemically synthesized
  source 1..22: mol_type = other DNA
atcagagaatgtgccccccagg

SEQ ID NO: 52919 - DNA, 22 bp, synthetic construct
  misc_feature 1..22: note = chemically synthesized
  source 1..22: mol_type = other DNA
tcagagaatgtgccccccaggt

SEQ ID NO: 52920 - DNA, 22 bp, synthetic construct
  misc_feature 1..22: note = chemically synthesized
  source 1..22: mol_type = other DNA
aaacatatgttaatcctgtggc

SEQ ID NO: 52921 - DNA, 22 bp, synthetic construct
  misc_feature 1..22: note = chemically synthesized
  source 1..22: mol_type = other DNA
atcctgtggcagagaagtttgt

SEQ ID NO: 52922 - DNA, 22 bp, synthetic construct
  misc_feature 1..22: note = chemically synthesized
  source 1..22: mol_type = other DNA
tggcagagaagtttgttctagc

SEQ ID NO: 52923 - DNA, 22 bp, synthetic construct
  misc_feature 1..22: note = chemically synthesized
  source 1..22: mol_type = other DNA
gttctagcctttgggtgtagcc

SEQ ID NO: 52924 - DNA, 22 bp, synthetic construct
  misc_feature 1..22: note = chemically synthesized
  source 1..22: mol_type = other DNA
ttctagcctttgggtgtagcct

SEQ ID NO: 52925 - DNA, 22 bp, synthetic construct
  misc_feature 1..22: note = chemically synthesized
  source 1..22: mol_type = other DNA
tagcctttgggtgtagcctgct

SEQ ID NO: 52926 - DNA, 22 bp, synthetic construct
  misc_feature 1..22: note = chemically synthesized
  source 1..22: mol_type = other DNA
gcctttgggtgtagcctgctga

SEQ ID NO: 52927 - DNA, 22 bp, synthetic construct
  misc_feature 1..22: note = chemically synthesized
  source 1..22: mol_type = other DNA
tgggtgtagcctgctgaataag

SEQ ID NO: 52928 - DNA, 22 bp, synthetic construct
  misc_feature 1..22: note = chemically synthesized
  source 1..22: mol_type = other DNA
gggtgtagcctgctgaataagt

SEQ ID NO: 52929 - DNA, 22 bp, synthetic construct
  misc_feature 1..22: note = chemically synthesized
  source 1..22: mol_type = other DNA
ggtgtagcctgctgaataagtt

SEQ ID NO: 52930 - DNA, 22 bp, synthetic construct
  misc_feature 1..22: note = chemically synthesized
  source 1..22: mol_type = other DNA
ctgaataagttcacagtgatct

SEQ ID NO: 52931 - DNA, 22 bp, synthetic construct
  misc_feature 1..22: note = chemically synthesized
  source 1..22: mol_type = other DNA
aataagttcacagtgatctaca

SEQ ID NO: 52932 - DNA, 22 bp, synthetic construct
  misc_feature 1..22: note = chemically synthesized
  source 1..22: mol_type = other DNA
acagtgatctacatcctagttt

SEQ ID NO: 52933 - DNA, 22 bp, synthetic construct
  misc_feature 1..22: note = chemically synthesized
  source 1..22: mol_type = other DNA
catcctagtttccatgggctga

SEQ ID NO: 52934 - DNA, 22 bp, synthetic construct
  misc_feature 1..22: note = chemically synthesized
  source 1..22: mol_type = other DNA
gtttccatgggctgaaatagaa

SEQ ID NO: 52935 - DNA, 22 bp, synthetic construct
  misc_feature 1..22: note = chemically synthesized
  source 1..22: mol_type = other DNA
ccatgggctgaaatagaatatt

SEQ ID NO: 52936 - DNA, 22 bp, synthetic construct
  misc_feature 1..22: note = chemically synthesized
  source 1..22: mol_type = other DNA
catgggctgaaatagaatattc

SEQ ID NO: 52937 - DNA, 22 bp, synthetic construct
  misc_feature 1..22: note = chemically synthesized
  source 1..22: mol_type = other DNA
aaatagaatattcatatcccct

SEQ ID NO: 52938 - DNA, 22 bp, synthetic construct
  misc_feature 1..22: note = chemically synthesized
  source 1..22: mol_type = other DNA
atatcccctgcactccctacac

SEQ ID NO: 52939 - DNA, 22 bp, synthetic construct
  misc_feature 1..22: note = chemically synthesized
  source 1..22: mol_type = other DNA
cactccctacacacacagacat

SEQ ID NO: 52940 - DNA, 22 bp, synthetic construct
  misc_feature 1..22: note = chemically synthesized
  source 1..22: mol_type = other DNA
cctacacacacagacatagaca

SEQ ID NO: 52941 - DNA, 22 bp, synthetic construct
  misc_feature 1..22: note = chemically synthesized
  source 1..22: mol_type = other DNA
cacacacagacatagacaccaa

SEQ ID NO: 52942 - DNA, 22 bp, synthetic construct
  misc_feature 1..22: note = chemically synthesized
  source 1..22: mol_type = other DNA
ccccaaaaaactctttgcttaa

SEQ ID NO: 52943 - DNA, 22 bp, synthetic construct
  misc_feature 1..22: note = chemically synthesized
  source 1..22: mol_type = other DNA
cccaaaaaactctttgcttaat

SEQ ID NO: 52944 - DNA, 22 bp, synthetic construct
  misc_feature 1..22: note = chemically synthesized
  source 1..22: mol_type = other DNA
tttgcttaatcttctcctgctc

SEQ ID NO: 52945 - DNA, 22 bp, synthetic construct
  misc_feature 1..22: note = chemically synthesized
  source 1..22: mol_type = other DNA
tgcttaatcttctcctgctctg

SEQ ID NO: 52946 - DNA, 22 bp, synthetic construct
  misc_feature 1..22: note = chemically synthesized
  source 1..22: mol_type = other DNA
gcttaatcttctcctgctctgt

SEQ ID NO: 52947 - DNA, 22 bp, synthetic construct
  misc_feature 1..22: note = chemically synthesized
  source 1..22: mol_type = other DNA
cttaatcttctcctgctctgta

SEQ ID NO: 52948 - DNA, 22 bp, synthetic construct
  misc_feature 1..22: note = chemically synthesized
  source 1..22: mol_type = other DNA
aatcttctcctgctctgtattt

SEQ ID NO: 52949 - DNA, 22 bp, synthetic construct
  misc_feature 1..22: note = chemically synthesized
  source 1..22: mol_type = other DNA
atcttctcctgctctgtatttt

SEQ ID NO: 52950 - DNA, 22 bp, synthetic construct
  misc_feature 1..22: note = chemically synthesized
  source 1..22: mol_type = other DNA
ctcctgctctgtattttctttg

SEQ ID NO: 52951 - DNA, 22 bp, synthetic construct
  misc_feature 1..22: note = chemically synthesized
  source 1..22: mol_type = other DNA
tcctgctctgtattttctttga

SEQ ID NO: 52952 - DNA, 22 bp, synthetic construct
  misc_feature 1..22: note = chemically synthesized
  source 1..22: mol_type = other DNA
ctgctctgtattttctttgata

SEQ ID NO: 52953 - DNA, 22 bp, synthetic construct
  misc_feature 1..22: note = chemically synthesized
  source 1..22: mol_type = other DNA
ctctgtattttctttgatattt

SEQ ID NO: 52954 - DNA, 22 bp, synthetic construct
  misc_feature 1..22: note = chemically synthesized
  source 1..22: mol_type = other DNA
tgtattttctttgatattttct

SEQ ID NO: 52955 - DNA, 22 bp, synthetic construct
  misc_feature 1..22: note = chemically synthesized
  source 1..22: mol_type = other DNA
tattttctttgatattttcttg

SEQ ID NO: 52956 - DNA, 22 bp, synthetic construct
  misc_feature 1..22: note = chemically synthesized
  source 1..22: mol_type = other DNA
tctttgatattttcttgaatgg

SEQ ID NO: 52957 - DNA, 22 bp, synthetic construct
  misc_feature 1..22: note = chemically synthesized
  source 1..22: mol_type = other DNA
ctttgatattttcttgaatggc

SEQ ID NO: 52958 - DNA, 22 bp, synthetic construct
  misc_feature 1..22: note = chemically synthesized
  source 1..22: mol_type = other DNA
tttgatattttcttgaatggct

SEQ ID NO: 52959 - DNA, 22 bp, synthetic construct
  misc_feature 1..22: note = chemically synthesized
  source 1..22: mol_type = other DNA
tgatattttcttgaatggcttc

SEQ ID NO: 52960 - DNA, 22 bp, synthetic construct
  misc_feature 1..22: note = chemically synthesized
  source 1..22: mol_type = other DNA
gatattttcttgaatggcttcc

SEQ ID NO: 52961 - DNA, 22 bp, synthetic construct
  misc_feature 1..22: note = chemically synthesized
  source 1..22: mol_type = other DNA
atattttcttgaatggcttcca

SEQ ID NO: 52962 - DNA, 22 bp, synthetic construct
  misc_feature 1..22: note = chemically synthesized
  source 1..22: mol_type = other DNA
tcttgaatggcttccactaaat

SEQ ID NO: 52963 - DNA, 22 bp, synthetic construct
  misc_feature 1..22: note = chemically synthesized
  source 1..22: mol_type = other DNA
cttgaatggcttccactaaatt

SEQ ID NO: 52964 - DNA, 22 bp, synthetic construct
  misc_feature 1..22: note = chemically synthesized
  source 1..22: mol_type = other DNA
ttgaatggcttccactaaattc

SEQ ID NO: 52965 - DNA, 22 bp, synthetic construct
  misc_feature 1..22: note = chemically synthesized
  source 1..22: mol_type = other DNA
gaatggcttccactaaattcaa

SEQ ID NO: 52966 - DNA, 22 bp, synthetic construct
  misc_feature 1..22: note = chemically synthesized
  source 1..22: mol_type = other DNA
aatggcttccactaaattcaaa

SEQ ID NO: 52967 - DNA, 22 bp, synthetic construct
  misc_feature 1..22: note = chemically synthesized
  source 1..22: mol_type = other DNA
ccactaaattcaaatgtgtttg

SEQ ID NO: 52968 - DNA, 22 bp, synthetic construct
  misc_feature 1..22: note = chemically synthesized
  source 1..22: mol_type = other DNA
cactaaattcaaatgtgtttga

SEQ ID NO: 52969 - DNA, 22 bp, synthetic construct
  misc_feature 1..22: note = chemically synthesized
  source 1..22: mol_type = other DNA
aattcaaatgtgtttgacttta

SEQ ID NO: 52970 - DNA, 22 bp, synthetic construct
  misc_feature 1..22: note = chemically synthesized
  source 1..22: mol_type = other DNA
aaatgtgtttgactttaaagtc

SEQ ID NO: 52971 - DNA, 22 bp, synthetic construct
  misc_feature 1..22: note = chemically synthesized
  source 1..22: mol_type = other DNA
gactttaaagtcaacttgtaaa

SEQ ID NO: 52972 - DNA, 22 bp, synthetic construct
  misc_feature 1..22: note = chemically synthesized
  source 1..22: mol_type = other DNA
actttaaagtcaacttgtaaaa

SEQ ID NO: 52973 - DNA, 22 bp, synthetic construct
  misc_feature 1..22: note = chemically synthesized
  source 1..22: mol_type = other DNA
taaagtcaacttgtaaaatttt

SEQ ID NO: 52974 - DNA, 22 bp, synthetic construct
  misc_feature 1..22: note = chemically synthesized
  source 1..22: mol_type = other DNA
aaagtcaacttgtaaaatttta

SEQ ID NO: 52975 - DNA, 22 bp, synthetic construct
  misc_feature 1..22: note = chemically synthesized
  source 1..22: mol_type = other DNA
aagtcaacttgtaaaattttat

SEQ ID NO: 52976 - DNA, 22 bp, synthetic construct
  misc_feature 1..22: note = chemically synthesized
  source 1..22: mol_type = other DNA
gtaaaattttatctggtaattt

SEQ ID NO: 52977 - DNA, 22 bp, synthetic construct
  misc_feature 1..22: note = chemically synthesized
  source 1..22: mol_type = other DNA
taaaattttatctggtaattta

SEQ ID NO: 52978 - DNA, 22 bp, synthetic construct
  misc_feature 1..22: note = chemically synthesized
  source 1..22: mol_type = other DNA
tatctggtaatttatagattaa

SEQ ID NO: 52979 - DNA, 22 bp, synthetic construct
  misc_feature 1..22: note = chemically synthesized
  source 1..22: mol_type = other DNA
atctggtaatttatagattaaa

SEQ ID NO: 52980 - DNA, 22 bp, synthetic construct
  misc_feature 1..22: note = chemically synthesized
  source 1..22: mol_type = other DNA
tctggtaatttatagattaaat

SEQ ID NO: 52981 - DNA, 22 bp, synthetic construct
  misc_feature 1..22: note = chemically synthesized
  source 1..22: mol_type = other DNA
gtaatttatagattaaattgca

SEQ ID NO: 52982 - DNA, 22 bp, synthetic construct
  misc_feature 1..22: note = chemically synthesized
  source 1..22: mol_type = other DNA
atagattaaattgcaagcatct

SEQ ID NO: 52983 - DNA, 22 bp, synthetic construct
  misc_feature 1..22: note = chemically synthesized
  source 1..22: mol_type = other DNA
tagattaaattgcaagcatcta

SEQ ID NO: 52984 - DNA, 22 bp, synthetic construct
  misc_feature 1..22: note = chemically synthesized
  source 1..22: mol_type = other DNA
aattgcaagcatctacctccct

SEQ ID NO: 52985 - DNA, 22 bp, synthetic construct
  misc_feature 1..22: note = chemically synthesized
  source 1..22: mol_type = other DNA
caagcatctacctccctttcat

SEQ ID NO: 52986 - DNA, 22 bp, synthetic construct
  misc_feature 1..22: note = chemically synthesized
  source 1..22: mol_type = other DNA
cctccctttcatcagactctcc

SEQ ID NO: 52987 - DNA, 22 bp, synthetic construct
  misc_feature 1..22: note = chemically synthesized
  source 1..22: mol_type = other DNA
cctttcatcagactctccctgc

SEQ ID NO: 52988 - DNA, 22 bp, synthetic construct
  misc_feature 1..22: note = chemically synthesized
  source 1..22: mol_type = other DNA
tcatcagactctccctgcaggg

SEQ ID NO: 52989 - DNA, 22 bp, synthetic construct
  misc_feature 1..22: note = chemically synthesized
  source 1..22: mol_type = other DNA
catcagactctccctgcagggc

SEQ ID NO: 52990 - DNA, 22 bp, synthetic construct
  misc_feature 1..22: note = chemically synthesized
  source 1..22: mol_type = other DNA
atcagactctccctgcagggca

SEQ ID NO: 52991 - DNA, 22 bp, synthetic construct
  misc_feature 1..22: note = chemically synthesized
  source 1..22: mol_type = other DNA
tccctgcagggcaagttcatct

SEQ ID NO: 52992 - DNA, 22 bp, synthetic construct
  misc_feature 1..22: note = chemically synthesized
  source 1..22: mol_type = other DNA
cctgcagggcaagttcatctaa

SEQ ID NO: 52993 - DNA, 22 bp, synthetic construct
  misc_feature 1..22: note = chemically synthesized
  source 1..22: mol_type = other DNA
cagggcaagttcatctaactat

SEQ ID NO: 52994 - DNA, 22 bp, synthetic construct
  misc_feature 1..22: note = chemically synthesized
  source 1..22: mol_type = other DNA
atctaactatgtatgtgcttca

SEQ ID NO: 52995 - DNA, 22 bp, synthetic construct
  misc_feature 1..22: note = chemically synthesized
  source 1..22: mol_type = other DNA
actatgtatgtgcttcaagatg

SEQ ID NO: 52996 - DNA, 22 bp, synthetic construct
  misc_feature 1..22: note = chemically synthesized
  source 1..22: mol_type = other DNA
tgtatgtgcttcaagatggaac

SEQ ID NO: 52997 - DNA, 22 bp, synthetic construct
  misc_feature 1..22: note = chemically synthesized
  source 1..22: mol_type = other DNA
caagatggaactcctgagttca

SEQ ID NO: 52998 - DNA, 22 bp, synthetic construct
  misc_feature 1..22: note = chemically synthesized
  source 1..22: mol_type = other DNA
aagatggaactcctgagttcac

SEQ ID NO: 52999 - DNA, 22 bp, synthetic construct
  misc_feature 1..22: note = chemically synthesized
  source 1..22: mol_type = other DNA
ctgagttcacaggtgatttata

SEQ ID NO: 53000 - DNA, 22 bp, synthetic construct
  misc_feature 1..22: note = chemically synthesized
  source 1..22: mol_type = other DNA
agttcacaggtgatttataaac

SEQ ID NO: 53001 - DNA, 22 bp, synthetic construct
  misc_feature 1..22: note = chemically synthesized
  source 1..22: mol_type = other DNA
acaggtgatttataaaccaaag

SEQ ID NO: 53002 - DNA, 22 bp, synthetic construct
  misc_feature 1..22: note = chemically synthesized
  source 1..22: mol_type = other DNA
ataaaccaaagcatgcccacta

SEQ ID NO: 53003 - DNA, 22 bp, synthetic construct
  misc_feature 1..22: note = chemically synthesized
  source 1..22: mol_type = other DNA
taaaccaaagcatgcccactac

SEQ ID NO: 53004 - DNA, 22 bp, synthetic construct
  misc_feature 1..22: note = chemically synthesized
  source 1..22: mol_type = other DNA
caaaactctcaccctccagaga

SEQ ID NO: 53005 - DNA, 22 bp, synthetic construct
  misc_feature 1..22: note = chemically synthesized
  source 1..22: mol_type = other DNA
tcaccctccagagatttgcctc

SEQ ID NO: 53006 - DNA, 22 bp, synthetic construct
  misc_feature 1..22: note = chemically synthesized
  source 1..22: mol_type = other DNA
accctccagagatttgcctcaa

SEQ ID NO: 53007 - DNA, 22 bp, synthetic construct
  misc_feature 1..22: note = chemically synthesized
  source 1..22: mol_type = other DNA
cagagatttgcctcaagggaca

SEQ ID NO: 53008 - DNA, 22 bp, synthetic construct
  misc_feature 1..22: note = chemically synthesized
  source 1..22: mol_type = other DNA
gcctcaagggacaacaccctgc

SEQ ID NO: 53009 - DNA, 22 bp, synthetic construct
  misc_feature 1..22: note = chemically synthesized
  source 1..22: mol_type = other DNA
cctcaagggacaacaccctgct

SEQ ID NO: 53010 - DNA, 22 bp, synthetic construct
  misc_feature 1..22: note = chemically synthesized
  source 1..22: mol_type = other DNA
aagggacaacaccctgctcaca

SEQ ID NO: 53011 - DNA, 22 bp, synthetic construct
  misc_feature 1..22: note = chemically synthesized
  source 1..22: mol_type = other DNA
ctcacaaaggcaccagcaggca

SEQ ID NO: 53012 - DNA, 22 bp, synthetic construct
  misc_feature 1..22: note = chemically synthesized
  source 1..22: mol_type = other DNA
acaaaggcaccagcaggcaact

SEQ ID NO: 53013 - DNA, 22 bp, synthetic construct
  misc_feature 1..22: note = chemically synthesized
  source 1..22: mol_type = other DNA
ctcaactacctggtggataagg

SEQ ID NO: 53014 - DNA, 22 bp, synthetic construct
  misc_feature 1..22: note = chemically synthesized
  source 1..22: mol_type = other DNA
aactacctggtggataaggtgc

SEQ ID NO: 53015 - DNA, 22 bp, synthetic construct
  misc_feature 1..22: note = chemically synthesized
  source 1..22: mol_type = other DNA
cctggtggataaggtgcccaag

SEQ ID NO: 53016 - DNA, 22 bp, synthetic construct
  misc_feature 1..22: note = chemically synthesized
  source 1..22: mol_type = other DNA
gtggataaggtgcccaagctag

SEQ ID NO: 53017 - DNA, 22 bp, synthetic construct
  misc_feature 1..22: note = chemically synthesized
  source 1..22: mol_type = other DNA
gcatggacccctgaatccttgc

SEQ ID NO: 53018 - DNA, 22 bp, synthetic construct
  misc_feature 1..22: note = chemically synthesized
  source 1..22: mol_type = other DNA
aatccttgctcgcctcctctgt

SEQ ID NO: 53019 - DNA, 22 bp, synthetic construct
  misc_feature 1..22: note = chemically synthesized
  source 1..22: mol_type = other DNA
gctcgcctcctctgttgccttt

SEQ ID NO: 53020 - DNA, 22 bp, synthetic construct
  misc_feature 1..22: note = chemically synthesized
  source 1..22: mol_type = other DNA
ctcgcctcctctgttgcctttt

SEQ ID NO: 53021 - DNA, 22 bp, synthetic construct
  misc_feature 1..22: note = chemically synthesized
  source 1..22: mol_type = other DNA
gcctcctctgttgccttttaaa

SEQ ID NO: 53022 - DNA, 22 bp, synthetic construct
  misc_feature 1..22: note = chemically synthesized
  source 1..22: mol_type = other DNA
ctctgttgccttttaaaagtgc

SEQ ID NO: 53023 - DNA, 22 bp, synthetic construct
  misc_feature 1..22: note = chemically synthesized
  source 1..22: mol_type = other DNA
tgttgccttttaaaagtgccac

SEQ ID NO: 53024 - DNA, 22 bp, synthetic construct
  misc_feature 1..22: note = chemically synthesized
  source 1..22: mol_type = other DNA
ttgccttttaaaagtgccactt

SEQ ID NO: 53025 - DNA, 22 bp, synthetic construct
  misc_feature 1..22: note = chemically synthesized
  source 1..22: mol_type = other DNA
ccttttaaaagtgccactttct

SEQ ID NO: 53026 - DNA, 22 bp, synthetic construct
  misc_feature 1..22: note = chemically synthesized
  source 1..22: mol_type = other DNA
ttaaaagtgccactttctgctc

SEQ ID NO: 53027 - DNA, 22 bp, synthetic construct
  misc_feature 1..22: note = chemically synthesized
  source 1..22: mol_type = other DNA
taaaagtgccactttctgctcc

SEQ ID NO: 53028 - DNA, 22 bp, synthetic construct
  misc_feature 1..22: note = chemically synthesized
  source 1..22: mol_type = other DNA
aaaagtgccactttctgctcct

SEQ ID NO: 53029 - DNA, 22 bp, synthetic construct
  misc_feature 1..22: note = chemically synthesized
  source 1..22: mol_type = other DNA
aaagtgccactttctgctccta

SEQ ID NO: 53030 - DNA, 22 bp, synthetic construct
  misc_feature 1..22: note = chemically synthesized
  source 1..22: mol_type = other DNA
tctgctcctaaagtgaagtagt

SEQ ID NO: 53031 - DNA, 22 bp, synthetic construct
  misc_feature 1..22: note = chemically synthesized
  source 1..22: mol_type = other DNA
ctgctcctaaagtgaagtagta

SEQ ID NO: 53032 - DNA, 22 bp, synthetic construct
  misc_feature 1..22: note = chemically synthesized
  source 1..22: mol_type = other DNA
tgctcctaaagtgaagtagtac

SEQ ID NO: 53033 - DNA, 22 bp, synthetic construct
  misc_feature 1..22: note = chemically synthesized
  source 1..22: mol_type = other DNA
ctcctaaagtgaagtagtacgg

SEQ ID NO: 53034 - DNA, 22 bp, synthetic construct
  misc_feature 1..22: note = chemically synthesized
  source 1..22: mol_type = other DNA
ctaaagtgaagtagtacggcag

SEQ ID NO: 53035 - DNA, 22 bp, synthetic construct
  misc_feature 1..22: note = chemically synthesized
  source 1..22: mol_type = other DNA
aagtgaagtagtacggcaggac

SEQ ID NO: 53036 - DNA, 22 bp, synthetic construct
  misc_feature 1..22: note = chemically synthesized
  source 1..22: mol_type = other DNA
ctgcatttcttcccctaagcta

SEQ ID NO: 53037 - DNA, 22 bp, synthetic construct
  misc_feature 1..22: note = chemically synthesized
  source 1..22: mol_type = other DNA
catttcttcccctaagctagct

SEQ ID NO: 53038 - DNA, 22 bp, synthetic construct
  misc_feature 1..22: note = chemically synthesized
  source 1..22: mol_type = other DNA
cttcccctaagctagctttgga

SEQ ID NO: 53039 - DNA, 22 bp, synthetic construct
  misc_feature 1..22: note = chemically synthesized
  source 1..22: mol_type = other DNA
ttcccctaagctagctttggaa

SEQ ID NO: 53040 - DNA, 22 bp, synthetic construct
  misc_feature 1..22: note = chemically synthesized
  source 1..22: mol_type = other DNA
cccctaagctagctttggaagc

SEQ ID NO: 53041 - DNA, 22 bp, synthetic construct
  misc_feature 1..22: note = chemically synthesized
  source 1..22: mol_type = other DNA
ccctaagctagctttggaagca

SEQ ID NO: 53042 - DNA, 22 bp, synthetic construct
  misc_feature 1..22: note = chemically synthesized
  source 1..22: mol_type = other DNA
agctagctttggaagcaaatca

SEQ ID NO: 53043 - DNA, 22 bp, synthetic construct
  misc_feature 1..22: note = chemically synthesized
  source 1..22: mol_type = other DNA
gctttggaagcaaatcactttc

SEQ ID NO: 53044 - DNA, 22 bp, synthetic construct
  misc_feature 1..22: note = chemically synthesized
  source 1..22: mol_type = other DNA
tggaagcaaatcactttcttta

SEQ ID NO: 53045 - DNA, 22 bp, synthetic construct
  misc_feature 1..22: note = chemically synthesized
  source 1..22: mol_type = other DNA
ggaagcaaatcactttctttat

SEQ ID NO: 53046 - DNA, 22 bp, synthetic construct
  misc_feature 1..22: note = chemically synthesized
  source 1..22: mol_type = other DNA
gaagcaaatcactttctttata

SEQ ID NO: 53047 - DNA, 22 bp, synthetic construct
  misc_feature 1..22: note = chemically synthesized
  source 1..22: mol_type = other DNA
tctttataccagacttctctct

SEQ ID NO: 53048 - DNA, 22 bp, synthetic construct
  misc_feature 1..22: note = chemically synthesized
  source 1..22: mol_type = other DNA
ctttataccagacttctctctt

SEQ ID NO: 53049 - DNA, 22 bp, synthetic construct
  misc_feature 1..22: note = chemically synthesized
  source 1..22: mol_type = other DNA
tttataccagacttctctcttc

SEQ ID NO: 53050 - DNA, 22 bp, synthetic construct
  misc_feature 1..22: note = chemically synthesized
  source 1..22: mol_type = other DNA
tataccagacttctctcttctt

SEQ ID NO: 53051 - DNA, 22 bp, synthetic construct
  misc_feature 1..22: note = chemically synthesized
  source 1..22: mol_type = other DNA
ataccagacttctctcttctta

SEQ ID NO: 53052 - DNA, 22 bp, synthetic construct
  misc_feature 1..22: note = chemically synthesized
  source 1..22: mol_type = other DNA
taccagacttctctcttcttaa

SEQ ID NO: 53053 - DNA, 22 bp, synthetic construct
  misc_feature 1..22: note = chemically synthesized
  source 1..22: mol_type = other DNA
ctctcttcttaattggattctg

SEQ ID NO: 53054 - DNA, 22 bp, synthetic construct
  misc_feature 1..22: note = chemically synthesized
  source 1..22: mol_type = other DNA
tctcttcttaattggattctgc

SEQ ID NO: 53055 - DNA, 22 bp, synthetic construct
  misc_feature 1..22: note = chemically synthesized
  source 1..22: mol_type = other DNA
tcttcttaattggattctgcaa

SEQ ID NO: 53056 - DNA, 22 bp, synthetic construct
  misc_feature 1..22: note = chemically synthesized
  source 1..22: mol_type = other DNA
ttcttaattggattctgcaagt

SEQ ID NO: 53057 - DNA, 22 bp, synthetic construct
  misc_feature 1..22: note = chemically synthesized
  source 1..22: mol_type = other DNA
cttaattggattctgcaagtgg

SEQ ID NO: 53058 - DNA, 22 bp, synthetic construct
  misc_feature 1..22: note = chemically synthesized
  source 1..22: mol_type = other DNA
ttaattggattctgcaagtggc

SEQ ID NO: 53059 - DNA, 22 bp, synthetic construct
  misc_feature 1..22: note = chemically synthesized
  source 1..22: mol_type = other DNA
aattggattctgcaagtggcaa

SEQ ID NO: 53060 - DNA, 22 bp, synthetic construct
  misc_feature 1..22: note = chemically synthesized
  source 1..22: mol_type = other DNA
attggattctgcaagtggcaaa

SEQ ID NO: 53061 - DNA, 22 bp, synthetic construct
  misc_feature 1..22: note = chemically synthesized
  source 1..22: mol_type = other DNA
gattctgcaagtggcaaacaat

SEQ ID NO: 53062 - DNA, 22 bp, synthetic construct
  misc_feature 1..22: note = chemically synthesized
  source 1..22: mol_type = other DNA
tgcaagtggcaaacaattaacc

SEQ ID NO: 53063 - DNA, 22 bp, synthetic construct
  misc_feature 1..22: note = chemically synthesized
  source 1..22: mol_type = other DNA
caagtggcaaacaattaacctg

SEQ ID NO: 53064 - DNA, 22 bp, synthetic construct
  misc_feature 1..22: note = chemically synthesized
  source 1..22: mol_type = other DNA
acctgctcttcagttacattgg

SEQ ID NO: 53065 - DNA, 22 bp, synthetic construct
  misc_feature 1..22: note = chemically synthesized
  source 1..22: mol_type = other DNA
ctcttcagttacattggaatgt

SEQ ID NO: 53066 - DNA, 22 bp, synthetic construct
  misc_feature 1..22: note = chemically synthesized
  source 1..22: mol_type = other DNA
ttcagttacattggaatgtgtt

SEQ ID NO: 53067 - DNA, 22 bp, synthetic construct
  misc_feature 1..22: note = chemically synthesized
  source 1..22: mol_type = other DNA
cagttacattggaatgtgttta

SEQ ID NO: 53068 - DNA, 22 bp, synthetic construct
  misc_feature 1..22: note = chemically synthesized
  source 1..22: mol_type = other DNA
agttacattggaatgtgtttag

SEQ ID NO: 53069 - DNA, 22 bp, synthetic construct
  misc_feature 1..22: note = chemically synthesized
  source 1..22: mol_type = other DNA
cattggaatgtgtttagattta

SEQ ID NO: 53070 - DNA, 22 bp, synthetic construct
  misc_feature 1..22: note = chemically synthesized
  source 1..22: mol_type = other DNA
gaatgtgtttagatttattttt

SEQ ID NO: 53071 - DNA, 22 bp, synthetic construct
  misc_feature 1..22: note = chemically synthesized
  source 1..22: mol_type = other DNA
agatttattttttcaaatgttg

SEQ ID NO: 53072 - DNA, 22 bp, synthetic construct
  misc_feature 1..22: note = chemically synthesized
  source 1..22: mol_type = other DNA
gatttattttttcaaatgttgg

SEQ ID NO: 53073 - DNA, 22 bp, synthetic construct
  misc_feature 1..22: note = chemically synthesized
  source 1..22: mol_type = other DNA
attttttcaaatgttggaacaa

SEQ ID NO: 53074 - DNA, 22 bp, synthetic construct
  misc_feature 1..22: note = chemically synthesized
  source 1..22: mol_type = other DNA
ttttttcaaatgttggaacaaa

SEQ ID NO: 53075 - DNA, 22 bp, synthetic construct
  misc_feature 1..22: note = chemically synthesized
  source 1..22: mol_type = other DNA
tttcaaatgttggaacaaagat

SEQ ID NO: 53076 - DNA, 22 bp, synthetic construct
  misc_feature 1..22: note = chemically synthesized
  source 1..22: mol_type = other DNA
ttcaaatgttggaacaaagatg

SEQ ID NO: 53077 - DNA, 22 bp, synthetic construct
  misc_feature 1..22: note = chemically synthesized
  source 1..22: mol_type = other DNA
tcaaatgttggaacaaagatga

SEQ ID NO: 53078 - DNA, 22 bp, synthetic construct
  misc_feature 1..22: note = chemically synthesized
  source 1..22: mol_type = other DNA
caaatgttggaacaaagatgaa

SEQ ID NO: 53079 - DNA, 22 bp, synthetic construct
  misc_feature 1..22: note = chemically synthesized
  source 1..22: mol_type = other DNA
aaatgttggaacaaagatgaaa

SEQ ID NO: 53080 - DNA, 22 bp, synthetic construct
  misc_feature 1..22: note = chemically synthesized
  source 1..22: mol_type = other DNA
gaacaaagatgaaaaagtgaga

SEQ ID NO: 53081 - DNA, 22 bp, synthetic construct
  misc_feature 1..22: note = chemically synthesized
  source 1..22: mol_type = other DNA
gattttttcttggaaatctggc

SEQ ID NO: 53082 - DNA, 22 bp, synthetic construct
  misc_feature 1..22: note = chemically synthesized
  source 1..22: mol_type = other DNA
tttcttggaaatctggcttaaa

SEQ ID NO: 53083 - DNA, 22 bp, synthetic construct
  misc_feature 1..22: note = chemically synthesized
  source 1..22: mol_type = other DNA
ttcttggaaatctggcttaaat

SEQ ID NO: 53084 - DNA, 22 bp, synthetic construct
  misc_feature 1..22: note = chemically synthesized
  source 1..22: mol_type = other DNA
tcttggaaatctggcttaaatc

SEQ ID NO: 53085 - DNA, 22 bp, synthetic construct
  misc_feature 1..22: note = chemically synthesized
  source 1..22: mol_type = other DNA
cttggaaatctggcttaaatcc

SEQ ID NO: 53086 - DNA, 22 bp, synthetic construct
  misc_feature 1..22: note = chemically synthesized
  source 1..22: mol_type = other DNA
ttggaaatctggcttaaatcca

SEQ ID NO: 53087 - DNA, 22 bp, synthetic construct
  misc_feature 1..22: note = chemically synthesized
  source 1..22: mol_type = other DNA
ggaaatctggcttaaatccagg

SEQ ID NO: 53088 - DNA, 22 bp, synthetic construct
  misc_feature 1..22: note = chemically synthesized
  source 1..22: mol_type = other DNA
gaaatctggcttaaatccaggt

SEQ ID NO: 53089 - DNA, 22 bp, synthetic construct
  misc_feature 1..22: note = chemically synthesized
  source 1..22: mol_type = other DNA
gcttaaatccaggtttctttat

SEQ ID NO: 53090 - DNA, 22 bp, synthetic construct
  misc_feature 1..22: note = chemically synthesized
  source 1..22: mol_type = other DNA
aaatccaggtttctttatttcc

SEQ ID NO: 53091 - DNA, 22 bp, synthetic construct
  misc_feature 1..22: note = chemically synthesized
  source 1..22: mol_type = other DNA
aatccaggtttctttatttcct

SEQ ID NO: 53092 - DNA, 22 bp, synthetic construct
  misc_feature 1..22: note = chemically synthesized
  source 1..22: mol_type = other DNA
ctttatttccttgatttgggaa

SEQ ID NO: 53093 - DNA, 22 bp, synthetic construct
  misc_feature 1..22: note = chemically synthesized
  source 1..22: mol_type = other DNA
tttatttccttgatttgggaat

SEQ ID NO: 53094 - DNA, 22 bp, synthetic construct
  misc_feature 1..22: note = chemically synthesized
  source 1..22: mol_type = other DNA
tatttccttgatttgggaattt

SEQ ID NO: 53095 - DNA, 22 bp, synthetic construct
  misc_feature 1..22: note = chemically synthesized
  source 1..22: mol_type = other DNA
atttccttgatttgggaatttg

SEQ ID NO: 53096 - DNA, 22 bp, synthetic construct
  misc_feature 1..22: note = chemically synthesized
  source 1..22: mol_type = other DNA
tttccttgatttgggaatttgg

SEQ ID NO: 53097 - DNA, 22 bp, synthetic construct
  misc_feature 1..22: note = chemically synthesized
  source 1..22: mol_type = other DNA
ccttgatttgggaatttggtca

SEQ ID NO: 53098 - DNA, 22 bp, synthetic construct
  misc_feature 1..22: note = chemically synthesized
  source 1..22: mol_type = other DNA
cttgatttgggaatttggtcac

SEQ ID NO: 53099 - DNA, 22 bp, synthetic construct
  misc_feature 1..22: note = chemically synthesized
  source 1..22: mol_type = other DNA
gatttgggaatttggtcacgag

SEQ ID NO: 53100 - DNA, 22 bp, synthetic construct
  misc_feature 1..22: note = chemically synthesized
  source 1..22: mol_type = other DNA
atttgggaatttggtcacgaga

SEQ ID NO: 53101 - DNA, 22 bp, synthetic construct
  misc_feature 1..22: note = chemically synthesized
  source 1..22: mol_type = other DNA
gggaatttggtcacgagacaaa

SEQ ID NO: 53102 - DNA, 22 bp, synthetic construct
  misc_feature 1..22: note = chemically synthesized
  source 1..22: mol_type = other DNA
ggaatttggtcacgagacaaat

SEQ ID NO: 53103 - DNA, 22 bp, synthetic construct
  misc_feature 1..22: note = chemically synthesized
  source 1..22: mol_type = other DNA
ggtcacgagacaaataacatga

SEQ ID NO: 53104 - DNA, 22 bp, synthetic construct
  misc_feature 1..22: note = chemically synthesized
  source 1..22: mol_type = other DNA
gtcacgagacaaataacatgat

SEQ ID NO: 53105 - DNA, 22 bp, synthetic construct
  misc_feature 1..22: note = chemically synthesized
  source 1..22: mol_type = other DNA
tcctaagtctagatttctttgt

SEQ ID NO: 53106 - DNA, 22 bp, synthetic construct
  misc_feature 1..22: note = chemically synthesized
  source 1..22: mol_type = other DNA
cctaagtctagatttctttgtt

SEQ ID NO: 53107 - DNA, 22 bp, synthetic construct
  misc_feature 1..22: note = chemically synthesized
  source 1..22: mol_type = other DNA
ctaagtctagatttctttgttt

SEQ ID NO: 53108 - DNA, 22 bp, synthetic construct
  misc_feature 1..22: note = chemically synthesized
  source 1..22: mol_type = other DNA
agtctagatttctttgtttata

SEQ ID NO: 53109 - DNA, 22 bp, synthetic construct
  misc_feature 1..22: note = chemically synthesized
  source 1..22: mol_type = other DNA
gatttctttgtttataaaatgg

SEQ ID NO: 53110 - DNA, 22 bp, synthetic construct
  misc_feature 1..22: note = chemically synthesized
  source 1..22: mol_type = other DNA
ctttgtttataaaatggggatg

SEQ ID NO: 53111 - DNA, 22 bp, synthetic construct
  misc_feature 1..22: note = chemically synthesized
  source 1..22: mol_type = other DNA
tttgtttataaaatggggatga

SEQ ID NO: 53112 - DNA, 22 bp, synthetic construct
  misc_feature 1..22: note = chemically synthesized
  source 1..22: mol_type = other DNA
tgtttataaaatggggatgact

SEQ ID NO: 53113 - DNA, 22 bp, synthetic construct
  misc_feature 1..22: note = chemically synthesized
  source 1..22: mol_type = other DNA
gtttataaaatggggatgacta

SEQ ID NO: 53114 - DNA, 22 bp, synthetic construct
  misc_feature 1..22: note = chemically synthesized
  source 1..22: mol_type = other DNA
tttataaaatggggatgactat

SEQ ID NO: 53115 - DNA, 22 bp, synthetic construct
  misc_feature 1..22: note = chemically synthesized
  source 1..22: mol_type = other DNA
ataaaatggggatgactatgct

SEQ ID NO: 53116 - DNA, 22 bp, synthetic construct
  misc_feature 1..22: note = chemically synthesized
  source 1..22: mol_type = other DNA
taaaatggggatgactatgcta

SEQ ID NO: 53117 - DNA, 22 bp, synthetic construct
  misc_feature 1..22: note = chemically synthesized
  source 1..22: mol_type = other DNA
tgctaccctacctataccatga

SEQ ID NO: 53118 - DNA, 22 bp, synthetic construct
  misc_feature 1..22: note = chemically synthesized
  source 1..22: mol_type = other DNA
ccctacctataccatgagctaa

SEQ ID NO: 53119 - DNA, 22 bp, synthetic construct
  misc_feature 1..22: note = chemically synthesized
  source 1..22: mol_type = other DNA
cctataccatgagctaaataag

SEQ ID NO: 53120 - DNA, 22 bp, synthetic construct
  misc_feature 1..22: note = chemically synthesized
  source 1..22: mol_type = other DNA
taccatgagctaaataagctag

SEQ ID NO: 53121 - DNA, 22 bp, synthetic construct
  misc_feature 1..22: note = chemically synthesized
  source 1..22: mol_type = other DNA
aataagctagtatttgtaaagg

SEQ ID NO: 53122 - DNA, 22 bp, synthetic construct
  misc_feature 1..22: note = chemically synthesized
  source 1..22: mol_type = other DNA
gtatttgtaaaggacacacact

SEQ ID NO: 53123 - DNA, 22 bp, synthetic construct
  misc_feature 1..22: note = chemically synthesized
  source 1..22: mol_type = other DNA
gtaaaggacacacacttacatt

SEQ ID NO: 53124 - DNA, 22 bp, synthetic construct
  misc_feature 1..22: note = chemically synthesized
  source 1..22: mol_type = other DNA
taaaggacacacacttacattc

SEQ ID NO: 53125 - DNA, 22 bp, synthetic construct
  misc_feature 1..22: note = chemically synthesized
  source 1..22: mol_type = other DNA
acattcacaatcacacacggtg

SEQ ID NO: 53126 - DNA, 22 bp, synthetic construct
  misc_feature 1..22: note = chemically synthesized
  source 1..22: mol_type = other DNA
cattcacaatcacacacggtgt

SEQ ID NO: 53127 - DNA, 22 bp, synthetic construct
  misc_feature 1..22: note = chemically synthesized
  source 1..22: mol_type = other DNA
acaatcacacacggtgtgtatg

SEQ ID NO: 53128 - DNA, 22 bp, synthetic construct
  misc_feature 1..22: note = chemically synthesized
  source 1..22: mol_type = other DNA
acccactcaacaaataccctga

SEQ ID NO: 53129 - DNA, 22 bp, synthetic construct
  misc_feature 1..22: note = chemically synthesized
  source 1..22: mol_type = other DNA
aacaaataccctgagtatttgt

SEQ ID NO: 53130 - DNA, 22 bp, synthetic construct
  misc_feature 1..22: note = chemically synthesized
  source 1..22: mol_type = other DNA
agtatttgttgaatcattatat

SEQ ID NO: 53131 - DNA, 22 bp, synthetic construct
  misc_feature 1..22: note = chemically synthesized
  source 1..22: mol_type = other DNA
gttgaatcattatatgcgtata

SEQ ID NO: 53132 - DNA, 22 bp, synthetic construct
  misc_feature 1..22: note = chemically synthesized
  source 1..22: mol_type = other DNA
ttgaatcattatatgcgtatat

SEQ ID NO: 53133 - DNA, 22 bp, synthetic construct
  misc_feature 1..22: note = chemically synthesized
  source 1..22: mol_type = other DNA
aatcattatatgcgtatatcat

SEQ ID NO: 53134 - DNA, 22 bp, synthetic construct
  misc_feature 1..22: note = chemically synthesized
  source 1..22: mol_type = other DNA
tatgcgtatatcatctggcaaa

SEQ ID NO: 53135 - DNA, 22 bp, synthetic construct
  misc_feature 1..22: note = chemically synthesized
  source 1..22: mol_type = other DNA
gcaaatggatgtgtataatttc

SEQ ID NO: 53136 - DNA, 22 bp, synthetic construct
  misc_feature 1..22: note = chemically synthesized
  source 1..22: mol_type = other DNA
ctccagggataagaagcaaatg

SEQ ID NO: 53137 - DNA, 22 bp, synthetic construct
  misc_feature 1..22: note = chemically synthesized
  source 1..22: mol_type = other DNA
tccagggataagaagcaaatgt

SEQ ID NO: 53138 - DNA, 22 bp, synthetic construct
  misc_feature 1..22: note = chemically synthesized
  source 1..22: mol_type = other DNA
cagggataagaagcaaatgtat

SEQ ID NO: 53139 - DNA, 22 bp, synthetic construct
  misc_feature 1..22: note = chemically synthesized
  source 1..22: mol_type = other DNA
actcaggccataacaaagagag

SEQ ID NO: 53140 - DNA, 22 bp, synthetic construct
  misc_feature 1..22: note = chemically synthesized
  source 1..22: mol_type = other DNA
ctcaggccataacaaagagaga

SEQ ID NO: 53141 - DNA, 22 bp, synthetic construct
  misc_feature 1..22: note = chemically synthesized
  source 1..22: mol_type = other DNA
aggccataacaaagagagaaat

SEQ ID NO: 53142 - DNA, 22 bp, synthetic construct
  misc_feature 1..22: note = chemically synthesized
  source 1..22: mol_type = other DNA
agtcccactccatgaacaggtc

SEQ ID NO: 53143 - DNA, 22 bp, synthetic construct
  misc_feature 1..22: note = chemically synthesized
  source 1..22: mol_type = other DNA
catgaacaggtcaaggaaccaa

SEQ ID NO: 53144 - DNA, 22 bp, synthetic construct
  misc_feature 1..22: note = chemically synthesized
  source 1..22: mol_type = other DNA
aaagagttatttcattgtttca

SEQ ID NO: 53145 - DNA, 22 bp, synthetic construct
  misc_feature 1..22: note = chemically synthesized
  source 1..22: mol_type = other DNA
tttcattgtttcaacttgctag

SEQ ID NO: 53146 - DNA, 22 bp, synthetic construct
  misc_feature 1..22: note = chemically synthesized
  source 1..22: mol_type = other DNA
cattgtttcaacttgctagtga

SEQ ID NO: 53147 - DNA, 22 bp, synthetic construct
  misc_feature 1..22: note = chemically synthesized
  source 1..22: mol_type = other DNA
attgtttcaacttgctagtgag

SEQ ID NO: 53148 - DNA, 22 bp, synthetic construct
  misc_feature 1..22: note = chemically synthesized
  source 1..22: mol_type = other DNA
tttcaacttgctagtgagggga

SEQ ID NO: 53149 - DNA, 22 bp, synthetic construct
  misc_feature 1..22: note = chemically synthesized
  source 1..22: mol_type = other DNA
caacttgctagtgaggggagca

SEQ ID NO: 53150 - DNA, 22 bp, synthetic construct
  misc_feature 1..22: note = chemically synthesized
  source 1..22: mol_type = other DNA
aacttgctagtgaggggagcat

SEQ ID NO: 53151 - DNA, 22 bp, synthetic construct
  misc_feature 1..22: note = chemically synthesized
  source 1..22: mol_type = other DNA
gctagtgaggggagcatggcac

SEQ ID NO: 53152 - DNA, 22 bp, synthetic construct
  misc_feature 1..22: note = chemically synthesized
  source 1..22: mol_type = other DNA
ctagtgaggggagcatggcacc

SEQ ID NO: 53153 - DNA, 22 bp, synthetic construct
  misc_feature 1..22: note = chemically synthesized
  source 1..22: mol_type = other DNA
gtgaggggagcatggcacctga

SEQ ID NO: 53154 - DNA, 22 bp, synthetic construct
  misc_feature 1..22: note = chemically synthesized
  source 1..22: mol_type = other DNA
aacagagatgatataaattaat

SEQ ID NO: 53155 - DNA, 22 bp, synthetic construct
  misc_feature 1..22: note = chemically synthesized
  source 1..22: mol_type = other DNA
atgaaactgagaaccaagcgaa

SEQ ID NO: 53156 - DNA, 22 bp, synthetic construct
  misc_feature 1..22: note = chemically synthesized
  source 1..22: mol_type = other DNA
agaaccaagcgaagagcttagc

SEQ ID NO: 53157 - DNA, 22 bp, synthetic construct
  misc_feature 1..22: note = chemically synthesized
  source 1..22: mol_type = other DNA
agccatcctttgcatagttagc

SEQ ID NO: 53158 - DNA, 22 bp, synthetic construct
  misc_feature 1..22: note = chemically synthesized
  source 1..22: mol_type = other DNA
gccatcctttgcatagttagct

SEQ ID NO: 53159 - DNA, 22 bp, synthetic construct
  misc_feature 1..22: note = chemically synthesized
  source 1..22: mol_type = other DNA
tgcatagttagctacaatggct

SEQ ID NO: 53160 - DNA, 22 bp, synthetic construct
  misc_feature 1..22: note = chemically synthesized
  source 1..22: mol_type = other DNA
gcatagttagctacaatggcta

SEQ ID NO: 53161 - DNA, 22 bp, synthetic construct
  misc_feature 1..22: note = chemically synthesized
  source 1..22: mol_type = other DNA
catagttagctacaatggctat

SEQ ID NO: 53162 - DNA, 22 bp, synthetic construct
  misc_feature 1..22: note = chemically synthesized
  source 1..22: mol_type = other DNA
gctacaatggctatttattttt

SEQ ID NO: 53163 - DNA, 22 bp, synthetic construct
  misc_feature 1..22: note = chemically synthesized
  source 1..22: mol_type = other DNA
caatggctatttatttttcagc

SEQ ID NO: 53164 - DNA, 22 bp, synthetic construct
  misc_feature 1..22: note = chemically synthesized
  source 1..22: mol_type = other DNA
tttatttttcagccagactggc

SEQ ID NO: 53165 - DNA, 22 bp, synthetic construct
  misc_feature 1..22: note = chemically synthesized
  source 1..22: mol_type = other DNA
atttttcagccagactggccat

SEQ ID NO: 53166 - DNA, 22 bp, synthetic construct
  misc_feature 1..22: note = chemically synthesized
  source 1..22: mol_type = other DNA
tttttcagccagactggccatc

SEQ ID NO: 53167 - DNA, 22 bp, synthetic construct
  misc_feature 1..22: note = chemically synthesized
  source 1..22: mol_type = other DNA
ttcagccagactggccatcatg

SEQ ID NO: 53168 - DNA, 22 bp, synthetic construct
  misc_feature 1..22: note = chemically synthesized
  source 1..22: mol_type = other DNA
tcagccagactggccatcatgt

SEQ ID NO: 53169 - DNA, 22 bp, synthetic construct
  misc_feature 1..22: note = chemically synthesized
  source 1..22: mol_type = other DNA
cagccagactggccatcatgta

SEQ ID NO: 53170 - DNA, 22 bp, synthetic construct
  misc_feature 1..22: note = chemically synthesized
  source 1..22: mol_type = other DNA
agccagactggccatcatgtag

SEQ ID NO: 53171 - DNA, 22 bp, synthetic construct
  misc_feature 1..22: note = chemically synthesized
  source 1..22: mol_type = other DNA
gccatcatgtaggcacactctt

SEQ ID NO: 53172 - DNA, 22 bp, synthetic construct
  misc_feature 1..22: note = chemically synthesized
  source 1..22: mol_type = other DNA
ttttagattagaaaaatcaacc

SEQ ID NO: 53173 - DNA, 22 bp, synthetic construct
  misc_feature 1..22: note = chemically synthesized
  source 1..22: mol_type = other DNA
ttagattagaaaaatcaaccat

SEQ ID NO: 53174 - DNA, 22 bp, synthetic construct
  misc_feature 1..22: note = chemically synthesized
  source 1..22: mol_type = other DNA
tagattagaaaaatcaaccatt

SEQ ID NO: 53175 - DNA, 22 bp, synthetic construct
  misc_feature 1..22: note = chemically synthesized
  source 1..22: mol_type = other DNA
agattagaaaaatcaaccatta

SEQ ID NO: 53176 - DNA, 22 bp, synthetic construct
  misc_feature 1..22: note = chemically synthesized
  source 1..22: mol_type = other DNA
gattagaaaaatcaaccattat

SEQ ID NO: 53177 - DNA, 22 bp, synthetic construct
  misc_feature 1..22: note = chemically synthesized
  source 1..22: mol_type = other DNA
gaaaaatcaaccattatttttt

SEQ ID NO: 53178 - DNA, 22 bp, synthetic construct
  misc_feature 1..22: note = chemically synthesized
  source 1..22: mol_type = other DNA
ttttttctgcccattcattcca

SEQ ID NO: 53179 - DNA, 22 bp, synthetic construct
  misc_feature 1..22: note = chemically synthesized
  source 1..22: mol_type = other DNA
tttctgcccattcattccagca

SEQ ID NO: 53180 - DNA, 22 bp, synthetic construct
  misc_feature 1..22: note = chemically synthesized
  source 1..22: mol_type = other DNA
ttctgcccattcattccagcac

SEQ ID NO: 53181 - DNA, 22 bp, synthetic construct
  misc_feature 1..22: note = chemically synthesized
  source 1..22: mol_type = other DNA
tctgcccattcattccagcacc

SEQ ID NO: 53182 - DNA, 22 bp, synthetic construct
  misc_feature 1..22: note = chemically synthesized
  source 1..22: mol_type = other DNA
ctgcccattcattccagcaccg

SEQ ID NO: 53183 - DNA, 22 bp, synthetic construct
  misc_feature 1..22: note = chemically synthesized
  source 1..22: mol_type = other DNA
tgcccattcattccagcaccgt

SEQ ID NO: 53184 - DNA, 22 bp, synthetic construct
  misc_feature 1..22: note = chemically synthesized
  source 1..22: mol_type = other DNA
cccattcattccagcaccgtga

SEQ ID NO: 53185 - DNA, 22 bp, synthetic construct
  misc_feature 1..22: note = chemically synthesized
  source 1..22: mol_type = other DNA
attccagcaccgtgacagtctt

SEQ ID NO: 53186 - DNA, 22 bp, synthetic construct
  misc_feature 1..22: note = chemically synthesized
  source 1..22: mol_type = other DNA
cagcaccgtgacagtcttcacg

SEQ ID NO: 53187 - DNA, 22 bp, synthetic construct
  misc_feature 1..22: note = chemically synthesized
  source 1..22: mol_type = other DNA
cacggggaaattaaacttattt

SEQ ID NO: 53188 - DNA, 22 bp, synthetic construct
  misc_feature 1..22: note = chemically synthesized
  source 1..22: mol_type = other DNA
acggggaaattaaacttatttt

SEQ ID NO: 53189 - DNA, 22 bp, synthetic construct
  misc_feature 1..22: note = chemically synthesized
  source 1..22: mol_type = other DNA
aacttatttttttaagaatttt

SEQ ID NO: 53190 - DNA, 22 bp, synthetic construct
  misc_feature 1..22: note = chemically synthesized
  source 1..22: mol_type = other DNA
atttttttaagaatttttcaat

SEQ ID NO: 53191 - DNA, 22 bp, synthetic construct
  misc_feature 1..22: note = chemically synthesized
  source 1..22: mol_type = other DNA
tttttttaagaatttttcaatc

SEQ ID NO: 53192 - DNA, 22 bp, synthetic construct
  misc_feature 1..22: note = chemically synthesized
  source 1..22: mol_type = other DNA
ttttaagaatttttcaatcata

SEQ ID NO: 53193 - DNA, 22 bp, synthetic construct
  misc_feature 1..22: note = chemically synthesized
  source 1..22: mol_type = other DNA
tttaagaatttttcaatcatat

SEQ ID NO: 53194 - DNA, 22 bp, synthetic construct
  misc_feature 1..22: note = chemically synthesized
  source 1..22: mol_type = other DNA
ttaagaatttttcaatcatata

SEQ ID NO: 53195 - DNA, 22 bp, synthetic construct
  misc_feature 1..22: note = chemically synthesized
  source 1..22: mol_type = other DNA
taagaatttttcaatcatatac

SEQ ID NO: 53196 - DNA, 22 bp, synthetic construct
  misc_feature 1..22: note = chemically synthesized
  source 1..22: mol_type = other DNA
aagaatttttcaatcatataca

SEQ ID NO: 53197 - DNA, 22 bp, synthetic construct
  misc_feature 1..22: note = chemically synthesized
  source 1..22: mol_type = other DNA
agaatttttcaatcatatacaa

SEQ ID NO: 53198 - DNA, 22 bp, synthetic construct
  misc_feature 1..22: note = chemically synthesized
  source 1..22: mol_type = other DNA
ttcaatcatatacaagattttg

SEQ ID NO: 53199 - DNA, 22 bp, synthetic construct
  misc_feature 1..22: note = chemically synthesized
  source 1..22: mol_type = other DNA
tcaatcatatacaagattttga

SEQ ID NO: 53200 - DNA, 22 bp, synthetic construct
  misc_feature 1..22: note = chemically synthesized
  source 1..22: mol_type = other DNA
caatcatatacaagattttgaa

SEQ ID NO: 53201 - DNA, 22 bp, synthetic construct
  misc_feature 1..22: note = chemically synthesized
  source 1..22: mol_type = other DNA
aatcatatacaagattttgaac

SEQ ID NO: 53202 - DNA, 22 bp, synthetic construct
  misc_feature 1..22: note = chemically synthesized
  source 1..22: mol_type = other DNA
tgaactgggaatttcatgaatc

SEQ ID NO: 53203 - DNA, 22 bp, synthetic construct
  misc_feature 1..22: note = chemically synthesized
  source 1..22: mol_type = other DNA
gaactgggaatttcatgaatca

SEQ ID NO: 53204 - DNA, 22 bp, synthetic construct
  misc_feature 1..22: note = chemically synthesized
  source 1..22: mol_type = other DNA
aactgggaatttcatgaatcaa

SEQ ID NO: 53205 - DNA, 22 bp, synthetic construct
  misc_feature 1..22: note = chemically synthesized
  source 1..22: mol_type = other DNA
ggaatttcatgaatcaaaaatt

SEQ ID NO: 53206 - DNA, 22 bp, synthetic construct
  misc_feature 1..22: note = chemically synthesized
  source 1..22: mol_type = other DNA
catgaatcaaaaattaaatgaa

SEQ ID NO: 53207 - DNA, 22 bp, synthetic construct
  misc_feature 1..22: note = chemically synthesized
  source 1..22: mol_type = other DNA
atgaatcaaaaattaaatgaat

SEQ ID NO: 53208 - DNA, 22 bp, synthetic construct
  misc_feature 1..22: note = chemically synthesized
  source 1..22: mol_type = other DNA
aatgaattgcacataaagccat

SEQ ID NO: 53209 - DNA, 22 bp, synthetic construct
  misc_feature 1..22: note = chemically synthesized
  source 1..22: mol_type = other DNA
cacataaagccatggcatatgt

SEQ ID NO: 53210 - DNA, 22 bp, synthetic construct
  misc_feature 1..22: note = chemically synthesized
  source 1..22: mol_type = other DNA
ttactacattgtgggagaaaaa

SEQ ID NO: 53211 - DNA, 22 bp, synthetic construct
  misc_feature 1..22: note = chemically synthesized
  source 1..22: mol_type = other DNA
tactacattgtgggagaaaaaa

SEQ ID NO: 53212 - DNA, 22 bp, synthetic construct
  misc_feature 1..22: note = chemically synthesized
  source 1..22: mol_type = other DNA
actacattgtgggagaaaaaat

SEQ ID NO: 53213 - DNA, 22 bp, synthetic construct
  misc_feature 1..22: note = chemically synthesized
  source 1..22: mol_type = other DNA
ctacattgtgggagaaaaaata

SEQ ID NO: 53214 - DNA, 22 bp, synthetic construct
  misc_feature 1..22: note = chemically synthesized
  source 1..22: mol_type = other DNA
cattgtgggagaaaaaataatt

SEQ ID NO: 53215 - DNA, 22 bp, synthetic construct
  misc_feature 1..22: note = chemically synthesized
  source 1..22: mol_type = other DNA
tgggagaaaaaataattcttat

SEQ ID NO: 53216 - DNA, 22 bp, synthetic construct
  misc_feature 1..22: note = chemically synthesized
  source 1..22: mol_type = other DNA
ttataatttaaaaaaactatgt

SEQ ID NO: 53217 - DNA, 22 bp, synthetic construct
  misc_feature 1..22: note = chemically synthesized
  source 1..22: mol_type = other DNA
ataatttaaaaaaactatgtct

SEQ ID NO: 53218 - DNA, 22 bp, synthetic construct
  misc_feature 1..22: note = chemically synthesized
  source 1..22: mol_type = other DNA
taatttaaaaaaactatgtctt

SEQ ID NO: 53219 - DNA, 22 bp, synthetic construct
  misc_feature 1..22: note = chemically synthesized
  source 1..22: mol_type = other DNA
aaaaaaactatgtcttacctga

SEQ ID NO: 53220 - DNA, 22 bp, synthetic construct
  misc_feature 1..22: note = chemically synthesized
  source 1..22: mol_type = other DNA
aaaaaactatgtcttacctgat

SEQ ID NO: 53221 - DNA, 22 bp, synthetic construct
  misc_feature 1..22: note = chemically synthesized
  source 1..22: mol_type = other DNA
tgtcttacctgatttcagaaat

SEQ ID NO: 53222 - DNA, 22 bp, synthetic construct
  misc_feature 1..22: note = chemically synthesized
  source 1..22: mol_type = other DNA
acctgatttcagaaataaaaga

SEQ ID NO: 53223 - DNA, 22 bp, synthetic construct
  misc_feature 1..22: note = chemically synthesized
  source 1..22: mol_type = other DNA
cctgatttcagaaataaaagaa

SEQ ID NO: 53224 - DNA, 22 bp, synthetic construct
  misc_feature 1..22: note = chemically synthesized
  source 1..22: mol_type = other DNA
atttcagaaataaaagaagtag

SEQ ID NO: 53225 - DNA, 22 bp, synthetic construct
  misc_feature 1..22: note = chemically synthesized
  source 1..22: mol_type = other DNA
cagaaataaaagaagtagaaga

SEQ ID NO: 53226 - DNA, 22 bp, synthetic construct
  misc_feature 1..22: note = chemically synthesized
  source 1..22: mol_type = other DNA
agaaataaaagaagtagaagaa

SEQ ID NO: 53227 - DNA, 22 bp, synthetic construct
  misc_feature 1..22: note = chemically synthesized
  source 1..22: mol_type = other DNA
ccttatgttccattttgggact

SEQ ID NO: 53228 - DNA, 22 bp, synthetic construct
  misc_feature 1..22: note = chemically synthesized
  source 1..22: mol_type = other DNA
cttatgttccattttgggactg

SEQ ID NO: 53229 - DNA, 22 bp, synthetic construct
  misc_feature 1..22: note = chemically synthesized
  source 1..22: mol_type = other DNA
atgttccattttgggactggcc

SEQ ID NO: 53230 - DNA, 22 bp, synthetic construct
  misc_feature 1..22: note = chemically synthesized
  source 1..22: mol_type = other DNA
tgttccattttgggactggcca

SEQ ID NO: 53231 - DNA, 22 bp, synthetic construct
  misc_feature 1..22: note = chemically synthesized
  source 1..22: mol_type = other DNA
cattttgggactggccagcagt

SEQ ID NO: 53232 - DNA, 22 bp, synthetic construct
  misc_feature 1..22: note = chemically synthesized
  source 1..22: mol_type = other DNA
tgggactggccagcagtgccca

SEQ ID NO: 53233 - DNA, 22 bp, synthetic construct
  misc_feature 1..22: note = chemically synthesized
  source 1..22: mol_type = other DNA
gggactggccagcagtgcccag

SEQ ID NO: 53234 - DNA, 22 bp, synthetic construct
  misc_feature 1..22: note = chemically synthesized
  source 1..22: mol_type = other DNA
ggactggccagcagtgcccaga

SEQ ID NO: 53235 - DNA, 22 bp, synthetic construct
  misc_feature 1..22: note = chemically synthesized
  source 1..22: mol_type = other DNA
gccagcagtgcccagaaagtgt

SEQ ID NO: 53236 - DNA, 22 bp, synthetic construct
  misc_feature 1..22: note = chemically synthesized
  source 1..22: mol_type = other DNA
ttgacttacatgagagtaaacg

SEQ ID NO: 53237 - DNA, 22 bp, synthetic construct
  misc_feature 1..22: note = chemically synthesized
  source 1..22: mol_type = other DNA
acttacatgagagtaaacgcac

SEQ ID NO: 53238 - DNA, 22 bp, synthetic construct
  misc_feature 1..22: note = chemically synthesized
  source 1..22: mol_type = other DNA
acatgagagtaaacgcacccac

SEQ ID NO: 53239 - DNA, 22 bp, synthetic construct
  misc_feature 1..22: note = chemically synthesized
  source 1..22: mol_type = other DNA
catgagagtaaacgcacccaca

SEQ ID NO: 53240 - DNA, 22 bp, synthetic construct
  misc_feature 1..22: note = chemically synthesized
  source 1..22: mol_type = other DNA
agttaatgattctctcagagac

SEQ ID NO: 53241 - DNA, 22 bp, synthetic construct
  misc_feature 1..22: note = chemically synthesized
  source 1..22: mol_type = other DNA
atgattctctcagagacccatg

SEQ ID NO: 53242 - DNA, 22 bp, synthetic construct
  misc_feature 1..22: note = chemically synthesized
  source 1..22: mol_type = other DNA
tctcagagacccatgccactgg

SEQ ID NO: 53243 - DNA, 22 bp, synthetic construct
  misc_feature 1..22: note = chemically synthesized
  source 1..22: mol_type = other DNA
tcagagacccatgccactggct

SEQ ID NO: 53244 - DNA, 22 bp, synthetic construct
  misc_feature 1..22: note = chemically synthesized
  source 1..22: mol_type = other DNA
agagacccatgccactggctca

SEQ ID NO: 53245 - DNA, 22 bp, synthetic construct
  misc_feature 1..22: note = chemically synthesized
  source 1..22: mol_type = other DNA
gctcagcagggttcaaacatta

SEQ ID NO: 53246 - DNA, 22 bp, synthetic construct
  misc_feature 1..22: note = chemically synthesized
  source 1..22: mol_type = other DNA
agcagggttcaaacattacctt

SEQ ID NO: 53247 - DNA, 22 bp, synthetic construct
  misc_feature 1..22: note = chemically synthesized
  source 1..22: mol_type = other DNA
aaacattaccttgaatatagag

SEQ ID NO: 53248 - DNA, 22 bp, synthetic construct
  misc_feature 1..22: note = chemically synthesized
  source 1..22: mol_type = other DNA
ccttgaatatagagtcttataa

SEQ ID NO: 53249 - DNA, 22 bp, synthetic construct
  misc_feature 1..22: note = chemically synthesized
  source 1..22: mol_type = other DNA
gaatatagagtcttataaaata

SEQ ID NO: 53250 - DNA, 22 bp, synthetic construct
  misc_feature 1..22: note = chemically synthesized
  source 1..22: mol_type = other DNA
aatatagagtcttataaaatat

SEQ ID NO: 53251 - DNA, 22 bp, synthetic construct
  misc_feature 1..22: note = chemically synthesized
  source 1..22: mol_type = other DNA
ataaaatatttgagagtgcaat

SEQ ID NO: 53252 - DNA, 22 bp, synthetic construct
  misc_feature 1..22: note = chemically synthesized
  source 1..22: mol_type = other DNA
taaaatatttgagagtgcaatg

SEQ ID NO: 53253 - DNA, 22 bp, synthetic construct
  misc_feature 1..22: note = chemically synthesized
  source 1..22: mol_type = other DNA
gagagtgcaatgtcaatagatg

SEQ ID NO: 53254 - DNA, 22 bp, synthetic construct
  misc_feature 1..22: note = chemically synthesized
  source 1..22: mol_type = other DNA
agagtgcaatgtcaatagatgc

SEQ ID NO: 53255 - DNA, 22 bp, synthetic construct
  misc_feature 1..22: note = chemically synthesized
  source 1..22: mol_type = other DNA
ggaagtggtgaaagccatttcc

SEQ ID NO: 53256 - DNA, 22 bp, synthetic construct
  misc_feature 1..22: note = chemically synthesized
  source 1..22: mol_type = other DNA
cccccctcagctgctccacatt

SEQ ID NO: 53257 - DNA, 22 bp, synthetic construct
  misc_feature 1..22: note = chemically synthesized
  source 1..22: mol_type = other DNA
ccccctcagctgctccacattg

SEQ ID NO: 53258 - DNA, 22 bp, synthetic construct
  misc_feature 1..22: note = chemically synthesized
  source 1..22: mol_type = other DNA
agctgctccacattgcctttat

SEQ ID NO: 53259 - DNA, 22 bp, synthetic construct
  misc_feature 1..22: note = chemically synthesized
  source 1..22: mol_type = other DNA
ctccacattgcctttatgtctc

SEQ ID NO: 53260 - DNA, 22 bp, synthetic construct
  misc_feature 1..22: note = chemically synthesized
  source 1..22: mol_type = other DNA
cacattgcctttatgtctcctt

SEQ ID NO: 53261 - DNA, 22 bp, synthetic construct
  misc_feature 1..22: note = chemically synthesized
  source 1..22: mol_type = other DNA
cctttatgtctccttactcctt

SEQ ID NO: 53262 - DNA, 22 bp, synthetic construct
  misc_feature 1..22: note = chemically synthesized
  source 1..22: mol_type = other DNA
tatgtctccttactccttccct

SEQ ID NO: 53263 - DNA, 22 bp, synthetic construct
  misc_feature 1..22: note = chemically synthesized
  source 1..22: mol_type = other DNA
atgtctccttactccttccctc

SEQ ID NO: 53264 - DNA, 22 bp, synthetic construct
  misc_feature 1..22: note = chemically synthesized
  source 1..22: mol_type = other DNA
tgtctccttactccttccctca

SEQ ID NO: 53265 - DNA, 22 bp, synthetic construct
  misc_feature 1..22: note = chemically synthesized
  source 1..22: mol_type = other DNA
cttactccttccctcaccccta

SEQ ID NO: 53266 - DNA, 22 bp, synthetic construct
  misc_feature 1..22: note = chemically synthesized
  source 1..22: mol_type = other DNA
actccttccctcacccctagac

SEQ ID NO: 53267 - DNA, 22 bp, synthetic construct
  misc_feature 1..22: note = chemically synthesized
  source 1..22: mol_type = other DNA
ctccttccctcacccctagacc

SEQ ID NO: 53268 - DNA, 22 bp, synthetic construct
  misc_feature 1..22: note = chemically synthesized
  source 1..22: mol_type = other DNA
cttccctcacccctagaccttc

SEQ ID NO: 53269 - DNA, 22 bp, synthetic construct
  misc_feature 1..22: note = chemically synthesized
  source 1..22: mol_type = other DNA
ccctcacccctagaccttcatc

SEQ ID NO: 53270 - DNA, 22 bp, synthetic construct
  misc_feature 1..22: note = chemically synthesized
  source 1..22: mol_type = other DNA
cctcacccctagaccttcatct

SEQ ID NO: 53271 - DNA, 22 bp, synthetic construct
  misc_feature 1..22: note = chemically synthesized
  source 1..22: mol_type = other DNA
acccctagaccttcatctttcc

SEQ ID NO: 53272 - DNA, 22 bp, synthetic construct
  misc_feature 1..22: note = chemically synthesized
  source 1..22: mol_type = other DNA
gaccttcatctttcctgattag

SEQ ID NO: 53273 - DNA, 22 bp, synthetic construct
  misc_feature 1..22: note = chemically synthesized
  source 1..22: mol_type = other DNA
catctttcctgattagtcttgt

SEQ ID NO: 53274 - DNA, 22 bp, synthetic construct
  misc_feature 1..22: note = chemically synthesized
  source 1..22: mol_type = other DNA
atctttcctgattagtcttgtt

SEQ ID NO: 53275 - DNA, 22 bp, synthetic construct
  misc_feature 1..22: note = chemically synthesized
  source 1..22: mol_type = other DNA
tcctgattagtcttgtttcctc

SEQ ID NO: 53276 - DNA, 22 bp, synthetic construct
  misc_feature 1..22: note = chemically synthesized
  source 1..22: mol_type = other DNA
cctgattagtcttgtttcctcc

SEQ ID NO: 53277 - DNA, 22 bp, synthetic construct
  misc_feature 1..22: note = chemically synthesized
  source 1..22: mol_type = other DNA
ctgattagtcttgtttcctccc

SEQ ID NO: 53278 - DNA, 22 bp, synthetic construct
  misc_feature 1..22: note = chemically synthesized
  source 1..22: mol_type = other DNA
attagtcttgtttcctcccctc

SEQ ID NO: 53279 - DNA, 22 bp, synthetic construct
  misc_feature 1..22: note = chemically synthesized
  source 1..22: mol_type = other DNA
gtcttgtttcctcccctcttct

SEQ ID NO: 53280 - DNA, 22 bp, synthetic construct
  misc_feature 1..22: note = chemically synthesized
  source 1..22: mol_type = other DNA
gtttcctcccctcttctttcat

SEQ ID NO: 53281 - DNA, 22 bp, synthetic construct
  misc_feature 1..22: note = chemically synthesized
  source 1..22: mol_type = other DNA
tttcctcccctcttctttcatt

SEQ ID NO: 53282 - DNA, 22 bp, synthetic construct
  misc_feature 1..22: note = chemically synthesized
  source 1..22: mol_type = other DNA
cctcccctcttctttcattctc

SEQ ID NO: 53283 - DNA, 22 bp, synthetic construct
  misc_feature 1..22: note = chemically synthesized
  source 1..22: mol_type = other DNA
ctcccctcttctttcattctct

SEQ ID NO: 53284 - DNA, 22 bp, synthetic construct
  misc_feature 1..22: note = chemically synthesized
  source 1..22: mol_type = other DNA
ccctcttctttcattctctttc

SEQ ID NO: 53285 - DNA, 22 bp, synthetic construct
  misc_feature 1..22: note = chemically synthesized
  source 1..22: mol_type = other DNA
ttctttcattctctttcttttg

SEQ ID NO: 53286 - DNA, 22 bp, synthetic construct
  misc_feature 1..22: note = chemically synthesized
  source 1..22: mol_type = other DNA
ctttcattctctttcttttgga

SEQ ID NO: 53287 - DNA, 22 bp, synthetic construct
  misc_feature 1..22: note = chemically synthesized
  source 1..22: mol_type = other DNA
tttcattctctttcttttggat

SEQ ID NO: 53288 - DNA, 22 bp, synthetic construct
  misc_feature 1..22: note = chemically synthesized
  source 1..22: mol_type = other DNA
tcattctctttcttttggataa

SEQ ID NO: 53289 - DNA, 22 bp, synthetic construct
  misc_feature 1..22: note = chemically synthesized
  source 1..22: mol_type = other DNA
cattctctttcttttggataaa

SEQ ID NO: 53290 - DNA, 22 bp, synthetic construct
  misc_feature 1..22: note = chemically synthesized
  source 1..22: mol_type = other DNA
attctctttcttttggataaaa

SEQ ID NO: 53291 - DNA, 22 bp, synthetic construct
  misc_feature 1..22: note = chemically synthesized
  source 1..22: mol_type = other DNA
tctttcttttggataaaataaa

SEQ ID NO: 53292 - DNA, 22 bp, synthetic construct
  misc_feature 1..22: note = chemically synthesized
  source 1..22: mol_type = other DNA
tttcttttggataaaataaaat

SEQ ID NO: 53293 - DNA, 22 bp, synthetic construct
  misc_feature 1..22: note = chemically synthesized
  source 1..22: mol_type = other DNA
tcttttggataaaataaaatca

SEQ ID NO: 53294 - DNA, 22 bp, synthetic construct
  misc_feature 1..22: note = chemically synthesized
  source 1..22: mol_type = other DNA
cttttggataaaataaaatcat

SEQ ID NO: 53295 - DNA, 22 bp, synthetic construct
  misc_feature 1..22: note = chemically synthesized
  source 1..22: mol_type = other DNA
ttttggataaaataaaatcata

SEQ ID NO: 53296 - DNA, 22 bp, synthetic construct
  misc_feature 1..22: note = chemically synthesized
  source 1..22: mol_type = other DNA
ttggataaaataaaatcataaa

SEQ ID NO: 53297 - DNA, 22 bp, synthetic construct
  misc_feature 1..22: note = chemically synthesized
  source 1..22: mol_type = other DNA
tggataaaataaaatcataaaa

SEQ ID NO: 53298 - DNA, 22 bp, synthetic construct
  misc_feature 1..22: note = chemically synthesized
  source 1..22: mol_type = other DNA
ggataaaataaaatcataaaag

SEQ ID NO: 53299 - DNA, 22 bp, synthetic construct
  misc_feature 1..22: note = chemically synthesized
  source 1..22: mol_type = other DNA
gataaaataaaatcataaaagt

SEQ ID NO: 53300 - DNA, 22 bp, synthetic construct
  misc_feature 1..22: note = chemically synthesized
  source 1..22: mol_type = other DNA
atatttgctggtaacttccatg

SEQ ID NO: 53301 - DNA, 22 bp, synthetic construct
  misc_feature 1..22: note = chemically synthesized
  source 1..22: mol_type = other DNA
gctggtaacttccatgaccaga

SEQ ID NO: 53302 - DNA, 22 bp, synthetic construct
  misc_feature 1..22: note = chemically synthesized
  source 1..22: mol_type = other DNA
ctggtaacttccatgaccagac

SEQ ID NO: 53303 - DNA, 22 bp, synthetic construct
  misc_feature 1..22: note = chemically synthesized
  source 1..22: mol_type = other DNA
gtaacttccatgaccagaccct

SEQ ID NO: 53304 - DNA, 22 bp, synthetic construct
  misc_feature 1..22: note = chemically synthesized
  source 1..22: mol_type = other DNA
ccatgaccagaccctctgccaa

SEQ ID NO: 53305 - DNA, 22 bp, synthetic construct
  misc_feature 1..22: note = chemically synthesized
  source 1..22: mol_type = other DNA
catgaccagaccctctgccaag

SEQ ID NO: 53306 - DNA, 22 bp, synthetic construct
  misc_feature 1..22: note = chemically synthesized
  source 1..22: mol_type = other DNA
tgccaagtgctgcacatccata

SEQ ID NO: 53307 - DNA, 22 bp, synthetic construct
  misc_feature 1..22: note = chemically synthesized
  source 1..22: mol_type = other DNA
ccaagtgctgcacatccatagc

SEQ ID NO: 53308 - DNA, 22 bp, synthetic construct
  misc_feature 1..22: note = chemically synthesized
  source 1..22: mol_type = other DNA
cacatccatagcctccctcaag

SEQ ID NO: 53309 - DNA, 22 bp, synthetic construct
  misc_feature 1..22: note = chemically synthesized
  source 1..22: mol_type = other DNA
cctcaagctttccaacaggcag

SEQ ID NO: 53310 - DNA, 22 bp, synthetic construct
  misc_feature 1..22: note = chemically synthesized
  source 1..22: mol_type = other DNA
aagctttccaacaggcagtgct

SEQ ID NO: 53311 - DNA, 22 bp, synthetic construct
  misc_feature 1..22: note = chemically synthesized
  source 1..22: mol_type = other DNA
tccaacaggcagtgctgtacga

SEQ ID NO: 53312 - DNA, 22 bp, synthetic construct
  misc_feature 1..22: note = chemically synthesized
  source 1..22: mol_type = other DNA
ccaacaggcagtgctgtacgag

SEQ ID NO: 53313 - DNA, 22 bp, synthetic construct
  misc_feature 1..22: note = chemically synthesized
  source 1..22: mol_type = other DNA
caacaggcagtgctgtacgagg

SEQ ID NO: 53314 - DNA, 22 bp, synthetic construct
  misc_feature 1..22: note = chemically synthesized
  source 1..22: mol_type = other DNA
tacgaggagggggctgaggcct

SEQ ID NO: 53315 - DNA, 22 bp, synthetic construct
  misc_feature 1..22: note = chemically synthesized
  source 1..22: mol_type = other DNA
aggccttcccgaggttgtgtcg

SEQ ID NO: 53316 - DNA, 22 bp, synthetic construct
  misc_feature 1..22: note = chemically synthesized
  source 1..22: mol_type = other DNA
cccgaggttgtgtcgctaccca

SEQ ID NO: 53317 - DNA, 22 bp, synthetic construct
  misc_feature 1..22: note = chemically synthesized
  source 1..22: mol_type = other DNA
ccgaggttgtgtcgctacccag

SEQ ID NO: 53318 - DNA, 22 bp, synthetic construct
  misc_feature 1..22: note = chemically synthesized
  source 1..22: mol_type = other DNA
tgtcgctacccaggggtgcagc

SEQ ID NO: 53319 - DNA, 22 bp, synthetic construct
  misc_feature 1..22: note = chemically synthesized
  source 1..22: mol_type = other DNA
cccaggggtgcagctgatagac

SEQ ID NO: 53320 - DNA, 22 bp, synthetic construct
  misc_feature 1..22: note = chemically synthesized
  source 1..22: mol_type = other DNA
atagacacaaccctttcaggtc

SEQ ID NO: 53321 - DNA, 22 bp, synthetic construct
  misc_feature 1..22: note = chemically synthesized
  source 1..22: mol_type = other DNA
tcaggtcttagtttacgagcaa

SEQ ID NO: 53322 - DNA, 22 bp, synthetic construct
  misc_feature 1..22: note = chemically synthesized
  source 1..22: mol_type = other DNA
caggtcttagtttacgagcaag

SEQ ID NO: 53323 - DNA, 22 bp, synthetic construct
  misc_feature 1..22: note = chemically synthesized
  source 1..22: mol_type = other DNA
aggtcttagtttacgagcaagc

SEQ ID NO: 53324 - DNA, 22 bp, synthetic construct
  misc_feature 1..22: note = chemically synthesized
  source 1..22: mol_type = other DNA
agtttacgagcaagctaggtat

SEQ ID NO: 53325 - DNA, 22 bp, synthetic construct
  misc_feature 1..22: note = chemically synthesized
  source 1..22: mol_type = other DNA
gtttacgagcaagctaggtata

SEQ ID NO: 53326 - DNA, 22 bp, synthetic construct
  misc_feature 1..22: note = chemically synthesized
  source 1..22: mol_type = other DNA
acgagcaagctaggtataaatg

SEQ ID NO: 53327 - DNA, 22 bp, synthetic construct
  misc_feature 1..22: note = chemically synthesized
  source 1..22: mol_type = other DNA
cgagcaagctaggtataaatgt

SEQ ID NO: 53328 - DNA, 22 bp, synthetic construct
  misc_feature 1..22: note = chemically synthesized
  source 1..22: mol_type = other DNA
ggtataaatgttaacatctcca

SEQ ID NO: 53329 - DNA, 22 bp, synthetic construct
  misc_feature 1..22: note = chemically synthesized
  source 1..22: mol_type = other DNA
acatctccacatcctataccaa

SEQ ID NO: 53330 - DNA, 22 bp, synthetic construct
  misc_feature 1..22: note = chemically synthesized
  source 1..22: mol_type = other DNA
cacatcctataccaaactgtgc

SEQ ID NO: 53331 - DNA, 22 bp, synthetic construct
  misc_feature 1..22: note = chemically synthesized
  source 1..22: mol_type = other DNA
taccaaactgtgccgaaatgac

SEQ ID NO: 53332 - DNA, 22 bp, synthetic construct
  misc_feature 1..22: note = chemically synthesized
  source 1..22: mol_type = other DNA
tgccgaaatgacaacataagtg

SEQ ID NO: 53333 - DNA, 22 bp, synthetic construct
  misc_feature 1..22: note = chemically synthesized
  source 1..22: mol_type = other DNA
ttattatcttcaaaatttattt

SEQ ID NO: 53334 - DNA, 22 bp, synthetic construct
  misc_feature 1..22: note = chemically synthesized
  source 1..22: mol_type = other DNA
tattatcttcaaaatttattta

SEQ ID NO: 53335 - DNA, 22 bp, synthetic construct
  misc_feature 1..22: note = chemically synthesized
  source 1..22: mol_type = other DNA
attatcttcaaaatttatttat

SEQ ID NO: 53336 - DNA, 22 bp, synthetic construct
  misc_feature 1..22: note = chemically synthesized
  source 1..22: mol_type = other DNA
ttatcttcaaaatttatttatt

SEQ ID NO: 53337 - DNA, 22 bp, synthetic construct
  misc_feature 1..22: note = chemically synthesized
  source 1..22: mol_type = other DNA
tcttcaaaatttatttattcct

SEQ ID NO: 53338 - DNA, 22 bp, synthetic construct
  misc_feature 1..22: note = chemically synthesized
  source 1..22: mol_type = other DNA
caaaatttatttattcctagtg

SEQ ID NO: 53339 - DNA, 22 bp, synthetic construct
  misc_feature 1..22: note = chemically synthesized
  source 1..22: mol_type = other DNA
aaaatttatttattcctagtga

SEQ ID NO: 53340 - DNA, 22 bp, synthetic construct
  misc_feature 1..22: note = chemically synthesized
  source 1..22: mol_type = other DNA
atttattcctagtgaactcaca

SEQ ID NO: 53341 - DNA, 22 bp, synthetic construct
  misc_feature 1..22: note = chemically synthesized
  source 1..22: mol_type = other DNA
tttattcctagtgaactcacat

SEQ ID NO: 53342 - DNA, 22 bp, synthetic construct
  misc_feature 1..22: note = chemically synthesized
  source 1..22: mol_type = other DNA
attcctagtgaactcacatgtt

SEQ ID NO: 53343 - DNA, 22 bp, synthetic construct
  misc_feature 1..22: note = chemically synthesized
  source 1..22: mol_type = other DNA
ttcctagtgaactcacatgttt

SEQ ID NO: 53344 - DNA, 22 bp, synthetic construct
  misc_feature 1..22: note = chemically synthesized
  source 1..22: mol_type = other DNA
ctagtgaactcacatgttttct

SEQ ID NO: 53345 - DNA, 22 bp, synthetic construct
  misc_feature 1..22: note = chemically synthesized
  source 1..22: mol_type = other DNA
gtgaactcacatgttttctgta

SEQ ID NO: 53346 - DNA, 22 bp, synthetic construct
  misc_feature 1..22: note = chemically synthesized
  source 1..22: mol_type = other DNA
acatgttttctgtaattataaa

SEQ ID NO: 53347 - DNA, 22 bp, synthetic construct
  misc_feature 1..22: note = chemically synthesized
  source 1..22: mol_type = other DNA
tctgtaattataaattatgtta

SEQ ID NO: 53348 - DNA, 22 bp, synthetic construct
  misc_feature 1..22: note = chemically synthesized
  source 1..22: mol_type = other DNA
ctgtaattataaattatgttat

SEQ ID NO: 53349 - DNA, 22 bp, synthetic construct
  misc_feature 1..22: note = chemically synthesized
  source 1..22: mol_type = other DNA
tgtaattataaattatgttata

SEQ ID NO: 53350 - DNA, 22 bp, synthetic construct
  misc_feature 1..22: note = chemically synthesized
  source 1..22: mol_type = other DNA
taattataaattatgttataag

SEQ ID NO: 53351 - DNA, 22 bp, synthetic construct
  misc_feature 1..22: note = chemically synthesized
  source 1..22: mol_type = other DNA
taaattatgttataagatatca

SEQ ID NO: 53352 - DNA, 22 bp, synthetic construct
  misc_feature 1..22: note = chemically synthesized
  source 1..22: mol_type = other DNA
tgttataagatatcaatccttc

SEQ ID NO: 53353 - DNA, 22 bp, synthetic construct
  misc_feature 1..22: note = chemically synthesized
  source 1..22: mol_type = other DNA
taagatatcaatccttccagga

SEQ ID NO: 53354 - DNA, 22 bp, synthetic construct
  misc_feature 1..22: note = chemically synthesized
  source 1..22: mol_type = other DNA
ccaggagggggtggtggctcat

SEQ ID NO: 53355 - DNA, 22 bp, synthetic construct
  misc_feature 1..22: note = chemically synthesized
  source 1..22: mol_type = other DNA
caggagggggtggtggctcatg

SEQ ID NO: 53356 - DNA, 22 bp, synthetic construct
  misc_feature 1..22: note = chemically synthesized
  source 1..22: mol_type = other DNA
atgcctataatcccagcatttt

SEQ ID NO: 53357 - DNA, 22 bp, synthetic construct
  misc_feature 1..22: note = chemically synthesized
  source 1..22: mol_type = other DNA
taatcccagcattttgggaggc

SEQ ID NO: 53358 - DNA, 22 bp, synthetic construct
  misc_feature 1..22: note = chemically synthesized
  source 1..22: mol_type = other DNA
tgggaggccacggcagatggat

SEQ ID NO: 53359 - DNA, 22 bp, synthetic construct
  misc_feature 1..22: note = chemically synthesized
  source 1..22: mol_type = other DNA
gggaggccacggcagatggatc

SEQ ID NO: 53360 - DNA, 22 bp, synthetic construct
  misc_feature 1..22: note = chemically synthesized
  source 1..22: mol_type = other DNA
ggaggccacggcagatggatca

SEQ ID NO: 53361 - DNA, 22 bp, synthetic construct
  misc_feature 1..22: note = chemically synthesized
  source 1..22: mol_type = other DNA
aggccaggagtttgagacaagc

SEQ ID NO: 53362 - DNA, 22 bp, synthetic construct
  misc_feature 1..22: note = chemically synthesized
  source 1..22: mol_type = other DNA
gagacaagcctgggcaacatgc

SEQ ID NO: 53363 - DNA, 22 bp, synthetic construct
  misc_feature 1..22: note = chemically synthesized
  source 1..22: mol_type = other DNA
agacaagcctgggcaacatgcc

SEQ ID NO: 53364 - DNA, 22 bp, synthetic construct
  misc_feature 1..22: note = chemically synthesized
  source 1..22: mol_type = other DNA
ggcaacatgccaaaaccctgtc

SEQ ID NO: 53365 - DNA, 22 bp, synthetic construct
  misc_feature 1..22: note = chemically synthesized
  source 1..22: mol_type = other DNA
tctctacaaaaaatacaaaaat

SEQ ID NO: 53366 - DNA, 22 bp, synthetic construct
  misc_feature 1..22: note = chemically synthesized
  source 1..22: mol_type = other DNA
tacaaaaaatacaaaaattagc

SEQ ID NO: 53367 - DNA, 22 bp, synthetic construct
  misc_feature 1..22: note = chemically synthesized
  source 1..22: mol_type = other DNA
caaaaaatacaaaaattagctg

SEQ ID NO: 53368 - DNA, 22 bp, synthetic construct
  misc_feature 1..22: note = chemically synthesized
  source 1..22: mol_type = other DNA
gctgggtgtggaggcacatgcc

SEQ ID NO: 53369 - DNA, 22 bp, synthetic construct
  misc_feature 1..22: note = chemically synthesized
  source 1..22: mol_type = other DNA
ggtgtggaggcacatgccagtc

SEQ ID NO: 53370 - DNA, 22 bp, synthetic construct
  misc_feature 1..22: note = chemically synthesized
  source 1..22: mol_type = other DNA
ctaagtaggctgaggcactaga

SEQ ID NO: 53371 - DNA, 22 bp, synthetic construct
  misc_feature 1..22: note = chemically synthesized
  source 1..22: mol_type = other DNA
agtaggctgaggcactagaatt

SEQ ID NO: 53372 - DNA, 22 bp, synthetic construct
  misc_feature 1..22: note = chemically synthesized
  source 1..22: mol_type = other DNA
aggcactagaattgcttgaaca

SEQ ID NO: 53373 - DNA, 22 bp, synthetic construct
  misc_feature 1..22: note = chemically synthesized
  source 1..22: mol_type = other DNA
gaattgcttgaacacaggagat

SEQ ID NO: 53374 - DNA, 22 bp, synthetic construct
  misc_feature 1..22: note = chemically synthesized
  source 1..22: mol_type = other DNA
cttgaacacaggagatggaggt

SEQ ID NO: 53375 - DNA, 22 bp, synthetic construct
  misc_feature 1..22: note = chemically synthesized
  source 1..22: mol_type = other DNA
gaacacaggagatggaggttgc

SEQ ID NO: 53376 - DNA, 22 bp, synthetic construct
  misc_feature 1..22: note = chemically synthesized
  source 1..22: mol_type = other DNA
aacacaggagatggaggttgca

SEQ ID NO: 53377 - DNA, 22 bp, synthetic construct
  misc_feature 1..22: note = chemically synthesized
  source 1..22: mol_type = other DNA
cagtgagccaagaatgtgccac

SEQ ID NO: 53378 - DNA, 22 bp, synthetic construct
  misc_feature 1..22: note = chemically synthesized
  source 1..22: mol_type = other DNA
cactccagcctgggtgacagag

SEQ ID NO: 53379 - DNA, 22 bp, synthetic construct
  misc_feature 1..22: note = chemically synthesized
  source 1..22: mol_type = other DNA
cagcctgggtgacagagcaaga

SEQ ID NO: 53380 - DNA, 22 bp, synthetic construct
  misc_feature 1..22: note = chemically synthesized
  source 1..22: mol_type = other DNA
ggtgacagagcaagaatgtctc

SEQ ID NO: 53381 - DNA, 22 bp, synthetic construct
  misc_feature 1..22: note = chemically synthesized
  source 1..22: mol_type = other DNA
aggaaagaaaaaaaaataataa

SEQ ID NO: 53382 - DNA, 22 bp, synthetic construct
  misc_feature 1..22: note = chemically synthesized
  source 1..22: mol_type = other DNA
ataaaatatcaatccttcctat

SEQ ID NO: 53383 - DNA, 22 bp, synthetic construct
  misc_feature 1..22: note = chemically synthesized
  source 1..22: mol_type = other DNA
cctattctagtagttgtggctt

SEQ ID NO: 53384 - DNA, 22 bp, synthetic construct
  misc_feature 1..22: note = chemically synthesized
  source 1..22: mol_type = other DNA
ctattctagtagttgtggctta

SEQ ID NO: 53385 - DNA, 22 bp, synthetic construct
  misc_feature 1..22: note = chemically synthesized
  source 1..22: mol_type = other DNA
ttctagtagttgtggcttaaat

SEQ ID NO: 53386 - DNA, 22 bp, synthetic construct
  misc_feature 1..22: note = chemically synthesized
  source 1..22: mol_type = other DNA
tagtagttgtggcttaaataaa

SEQ ID NO: 53387 - DNA, 22 bp, synthetic construct
  misc_feature 1..22: note = chemically synthesized
  source 1..22: mol_type = other DNA
gtagttgtggcttaaataaata

SEQ ID NO: 53388 - DNA, 22 bp, synthetic construct
  misc_feature 1..22: note = chemically synthesized
  source 1..22: mol_type = other DNA
tggcttaaataaataaataaat

SEQ ID NO: 53389 - DNA, 22 bp, synthetic construct
  misc_feature 1..22: note = chemically synthesized
  source 1..22: mol_type = other DNA
aaataaataaataaatattttt

SEQ ID NO: 53390 - DNA, 22 bp, synthetic construct
  misc_feature 1..22: note = chemically synthesized
  source 1..22: mol_type = other DNA
aataaataaataaatattttta

SEQ ID NO: 53391 - DNA, 22 bp, synthetic construct
  misc_feature 1..22: note = chemically synthesized
  source 1..22: mol_type = other DNA
ttaaaaataaaacatagggtcg

SEQ ID NO: 53392 - DNA, 22 bp, synthetic construct
  misc_feature 1..22: note = chemically synthesized
  source 1..22: mol_type = other DNA
taaaaataaaacatagggtcga

SEQ ID NO: 53393 - DNA, 22 bp, synthetic construct
  misc_feature 1..22: note = chemically synthesized
  source 1..22: mol_type = other DNA
aaaaataaaacatagggtcgag

SEQ ID NO: 53394 - DNA, 22 bp, synthetic construct
  misc_feature 1..22: note = chemically synthesized
  source 1..22: mol_type = other DNA
aaaataaaacatagggtcgagt

SEQ ID NO: 53395 - DNA, 22 bp, synthetic construct
  misc_feature 1..22: note = chemically synthesized
  source 1..22: mol_type = other DNA
aactctgtaatcccagcacttt

SEQ ID NO: 53396 - DNA, 22 bp, synthetic construct
  misc_feature 1..22: note = chemically synthesized
  source 1..22: mol_type = other DNA
tgtaatcccagcactttgggag

SEQ ID NO: 53397 - DNA, 22 bp, synthetic construct
  misc_feature 1..22: note = chemically synthesized
  source 1..22: mol_type = other DNA
taatcccagcactttgggaggc

SEQ ID NO: 53398 - DNA, 22 bp, synthetic construct
  misc_feature 1..22: note = chemically synthesized
  source 1..22: mol_type = other DNA
tgggaggccaagacaggtggat

SEQ ID NO: 53399 - DNA, 22 bp, synthetic construct
  misc_feature 1..22: note = chemically synthesized
  source 1..22: mol_type = other DNA
gggaggccaagacaggtggatc

SEQ ID NO: 53400 - DNA, 22 bp, synthetic construct
  misc_feature 1..22: note = chemically synthesized
  source 1..22: mol_type = other DNA
ggaggccaagacaggtggatca

SEQ ID NO: 53401 - DNA, 22 bp, synthetic construct
  misc_feature 1..22: note = chemically synthesized
  source 1..22: mol_type = other DNA
gagaccagccaggccaatgtgg

SEQ ID NO: 53402 - DNA, 22 bp, synthetic construct
  misc_feature 1..22: note = chemically synthesized
  source 1..22: mol_type = other DNA
agaccagccaggccaatgtggt

SEQ ID NO: 53403 - DNA, 22 bp, synthetic construct
  misc_feature 1..22: note = chemically synthesized
  source 1..22: mol_type = other DNA
tactaaaaatacaaaaattagc

SEQ ID NO: 53404 - DNA, 22 bp, synthetic construct
  misc_feature 1..22: note = chemically synthesized
  source 1..22: mol_type = other DNA
ctaaaaatacaaaaattagcca

SEQ ID NO: 53405 - DNA, 22 bp, synthetic construct
  misc_feature 1..22: note = chemically synthesized
  source 1..22: mol_type = other DNA
aaaatacaaaaattagccaggc

SEQ ID NO: 53406 - DNA, 22 bp, synthetic construct
  misc_feature 1..22: note = chemically synthesized
  source 1..22: mol_type = other DNA
gccaggcgtggtggtgggcacc

SEQ ID NO: 53407 - DNA, 22 bp, synthetic construct
  misc_feature 1..22: note = chemically synthesized
  source 1..22: mol_type = other DNA
taatcccagctactagggaggc

SEQ ID NO: 53408 - DNA, 22 bp, synthetic construct
  misc_feature 1..22: note = chemically synthesized
  source 1..22: mol_type = other DNA
ctagggaggctggagtattcac

SEQ ID NO: 53409 - DNA, 22 bp, synthetic construct
  misc_feature 1..22: note = chemically synthesized
  source 1..22: mol_type = other DNA
gggaggctggagtattcacttg

SEQ ID NO: 53410 - DNA, 22 bp, synthetic construct
  misc_feature 1..22: note = chemically synthesized
  source 1..22: mol_type = other DNA
gagtattcacttgaacccagga

SEQ ID NO: 53411 - DNA, 22 bp, synthetic construct
  misc_feature 1..22: note = chemically synthesized
  source 1..22: mol_type = other DNA
acttgaacccaggaggtggaag

SEQ ID NO: 53412 - DNA, 22 bp, synthetic construct
  misc_feature 1..22: note = chemically synthesized
  source 1..22: mol_type = other DNA
gaacccaggaggtggaagttgc

SEQ ID NO: 53413 - DNA, 22 bp, synthetic construct
  misc_feature 1..22: note = chemically synthesized
  source 1..22: mol_type = other DNA
aacccaggaggtggaagttgca

SEQ ID NO: 53414 - DNA, 22 bp, synthetic construct
  misc_feature 1..22: note = chemically synthesized
  source 1..22: mol_type = other DNA
cagtgagccaaaatcacgtcag

SEQ ID NO: 53415 - DNA, 22 bp, synthetic construct
  misc_feature 1..22: note = chemically synthesized
  source 1..22: mol_type = other DNA
caaccggggtgagagtctcaat

SEQ ID NO: 53416 - DNA, 22 bp, synthetic construct
  misc_feature 1..22: note = chemically synthesized
  source 1..22: mol_type = other DNA
aaccggggtgagagtctcaata

SEQ ID NO: 53417 - DNA, 22 bp, synthetic construct
  misc_feature 1..22: note = chemically synthesized
  source 1..22: mol_type = other DNA
aataaaataaaataaaataaaa

SEQ ID NO: 53418 - DNA, 22 bp, synthetic construct
  misc_feature 1..22: note = chemically synthesized
  source 1..22: mol_type = other DNA
tccgcaaatgaattcatggtgc

SEQ ID NO: 53419 - DNA, 22 bp, synthetic construct
  misc_feature 1..22: note = chemically synthesized
  source 1..22: mol_type = other DNA
ccgcaaatgaattcatggtgca

SEQ ID NO: 53420 - DNA, 22 bp, synthetic construct
  misc_feature 1..22: note = chemically synthesized
  source 1..22: mol_type = other DNA
cgcaaatgaattcatggtgcaa

SEQ ID NO: 53421 - DNA, 22 bp, synthetic construct
  misc_feature 1..22: note = chemically synthesized
  source 1..22: mol_type = other DNA
atggtgcaatcttacattttcg

SEQ ID NO: 53422 - DNA, 22 bp, synthetic construct
  misc_feature 1..22: note = chemically synthesized
  source 1..22: mol_type = other DNA
acattttcgttctcatgaagta

SEQ ID NO: 53423 - DNA, 22 bp, synthetic construct
  misc_feature 1..22: note = chemically synthesized
  source 1..22: mol_type = other DNA
cattttcgttctcatgaagtaa

SEQ ID NO: 53424 - DNA, 22 bp, synthetic construct
  misc_feature 1..22: note = chemically synthesized
  source 1..22: mol_type = other DNA
tcgttctcatgaagtaaagcaa

SEQ ID NO: 53425 - DNA, 22 bp, synthetic construct
  misc_feature 1..22: note = chemically synthesized
  source 1..22: mol_type = other DNA
cgttctcatgaagtaaagcaag

SEQ ID NO: 53426 - DNA, 22 bp, synthetic construct
  misc_feature 1..22: note = chemically synthesized
  source 1..22: mol_type = other DNA
gttctcatgaagtaaagcaaga

SEQ ID NO: 53427 - DNA, 22 bp, synthetic construct
  misc_feature 1..22: note = chemically synthesized
  source 1..22: mol_type = other DNA
tcatgaagtaaagcaagagtgg

SEQ ID NO: 53428 - DNA, 22 bp, synthetic construct
  misc_feature 1..22: note = chemically synthesized
  source 1..22: mol_type = other DNA
atgaagtaaagcaagagtggta

SEQ ID NO: 53429 - DNA, 22 bp, synthetic construct
  misc_feature 1..22: note = chemically synthesized
  source 1..22: mol_type = other DNA
agtggaaagagtctatctctag

SEQ ID NO: 53430 - DNA, 22 bp, synthetic construct
  misc_feature 1..22: note = chemically synthesized
  source 1..22: mol_type = other DNA
tctctagtgtagtcacgtcagt

SEQ ID NO: 53431 - DNA, 22 bp, synthetic construct
  misc_feature 1..22: note = chemically synthesized
  source 1..22: mol_type = other DNA
tagtgtagtcacgtcagtggtt

SEQ ID NO: 53432 - DNA, 22 bp, synthetic construct
  misc_feature 1..22: note = chemically synthesized
  source 1..22: mol_type = other DNA
gtgtagtcacgtcagtggttgt

SEQ ID NO: 53433 - DNA, 22 bp, synthetic construct
  misc_feature 1..22: note = chemically synthesized
  source 1..22: mol_type = other DNA
tgtcaagatggttaggaggctc

SEQ ID NO: 53434 - DNA, 22 bp, synthetic construct
  misc_feature 1..22: note = chemically synthesized
  source 1..22: mol_type = other DNA
ggaggctcctcccgtttaaaac

SEQ ID NO: 53435 - DNA, 22 bp, synthetic construct
  misc_feature 1..22: note = chemically synthesized
  source 1..22: mol_type = other DNA
ctcccgtttaaaacagtatcca

SEQ ID NO: 53436 - DNA, 22 bp, synthetic construct
  misc_feature 1..22: note = chemically synthesized
  source 1..22: mol_type = other DNA
ccgtttaaaacagtatccaagc

SEQ ID NO: 53437 - DNA, 22 bp, synthetic construct
  misc_feature 1..22: note = chemically synthesized
  source 1..22: mol_type = other DNA
aaaacagtatccaagccccagt

SEQ ID NO: 53438 - DNA, 22 bp, synthetic construct
  misc_feature 1..22: note = chemically synthesized
  source 1..22: mol_type = other DNA
aaacagtatccaagccccagtt

SEQ ID NO: 53439 - DNA, 22 bp, synthetic construct
  misc_feature 1..22: note = chemically synthesized
  source 1..22: mol_type = other DNA
taaatcaattggggagacacgc

SEQ ID NO: 53440 - DNA, 22 bp, synthetic construct
  misc_feature 1..22: note = chemically synthesized
  source 1..22: mol_type = other DNA
gggagacacgccaactctgatc

SEQ ID NO: 53441 - DNA, 22 bp, synthetic construct
  misc_feature 1..22: note = chemically synthesized
  source 1..22: mol_type = other DNA
tgatcatcagcaatatctgagc

SEQ ID NO: 53442 - DNA, 22 bp, synthetic construct
  misc_feature 1..22: note = chemically synthesized
  source 1..22: mol_type = other DNA
atcatcagcaatatctgagctc

SEQ ID NO: 53443 - DNA, 22 bp, synthetic construct
  misc_feature 1..22: note = chemically synthesized
  source 1..22: mol_type = other DNA
agctccagtctcagatattgtg

SEQ ID NO: 53444 - DNA, 22 bp, synthetic construct
  misc_feature 1..22: note = chemically synthesized
  source 1..22: mol_type = other DNA
cagtctcagatattgtgtgcag

SEQ ID NO: 53445 - DNA, 22 bp, synthetic construct
  misc_feature 1..22: note = chemically synthesized
  source 1..22: mol_type = other DNA
agatattgtgtgcagttagtct

SEQ ID NO: 53446 - DNA, 22 bp, synthetic construct
  misc_feature 1..22: note = chemically synthesized
  source 1..22: mol_type = other DNA
tgtgcagttagtctctgtcctg

SEQ ID NO: 53447 - DNA, 22 bp, synthetic construct
  misc_feature 1..22: note = chemically synthesized
  source 1..22: mol_type = other DNA
gtctctgtcctgtaccctctac

SEQ ID NO: 53448 - DNA, 22 bp, synthetic construct
  misc_feature 1..22: note = chemically synthesized
  source 1..22: mol_type = other DNA
tgtcctgtaccctctacctcct

SEQ ID NO: 53449 - DNA, 22 bp, synthetic construct
  misc_feature 1..22: note = chemically synthesized
  source 1..22: mol_type = other DNA
tcctgtaccctctacctccttc

SEQ ID NO: 53450 - DNA, 22 bp, synthetic construct
  misc_feature 1..22: note = chemically synthesized
  source 1..22: mol_type = other DNA
taccctctacctccttccctac

SEQ ID NO: 53451 - DNA, 22 bp, synthetic construct
  misc_feature 1..22: note = chemically synthesized
  source 1..22: mol_type = other DNA
tacctccttccctaccagaaaa

SEQ ID NO: 53452 - DNA, 22 bp, synthetic construct
  misc_feature 1..22: note = chemically synthesized
  source 1..22: mol_type = other DNA
cctccttccctaccagaaaaat

SEQ ID NO: 53453 - DNA, 22 bp, synthetic construct
  misc_feature 1..22: note = chemically synthesized
  source 1..22: mol_type = other DNA
cttccctaccagaaaaatcacc

SEQ ID NO: 53454 - DNA, 22 bp, synthetic construct
  misc_feature 1..22: note = chemically synthesized
  source 1..22: mol_type = other DNA
ccctaccagaaaaatcaccact

SEQ ID NO: 53455 - DNA, 22 bp, synthetic construct
  misc_feature 1..22: note = chemically synthesized
  source 1..22: mol_type = other DNA
cctaccagaaaaatcaccactt

SEQ ID NO: 53456 - DNA, 22 bp, synthetic construct
  misc_feature 1..22: note = chemically synthesized
  source 1..22: mol_type = other DNA
ccagaaaaatcaccactttagt

SEQ ID NO: 53457 - DNA, 22 bp, synthetic construct
  misc_feature 1..22: note = chemically synthesized
  source 1..22: mol_type = other DNA
tagtccctggccaccgggacac

SEQ ID NO: 53458 - DNA, 22 bp, synthetic construct
  misc_feature 1..22: note = chemically synthesized
  source 1..22: mol_type = other DNA
agtccctggccaccgggacacc

SEQ ID NO: 53459 - DNA, 22 bp, synthetic construct
  misc_feature 1..22: note = chemically synthesized
  source 1..22: mol_type = other DNA
gtccctggccaccgggacaccc

SEQ ID NO: 53460 - DNA, 22 bp, synthetic construct
  misc_feature 1..22: note = chemically synthesized
  source 1..22: mol_type = other DNA
gccaccgggacaccccaggagg

SEQ ID NO: 53461 - DNA, 22 bp, synthetic construct
  misc_feature 1..22: note = chemically synthesized
  source 1..22: mol_type = other DNA
aggtagttatggcacttatggc

SEQ ID NO: 53462 - DNA, 22 bp, synthetic construct
  misc_feature 1..22: note = chemically synthesized
  source 1..22: mol_type = other DNA
tggcacttatggctcccttgct

SEQ ID NO: 53463 - DNA, 22 bp, synthetic construct
  misc_feature 1..22: note = chemically synthesized
  source 1..22: mol_type = other DNA
atggctcccttgctgctgatct

SEQ ID NO: 53464 - DNA, 22 bp, synthetic construct
  misc_feature 1..22: note = chemically synthesized
  source 1..22: mol_type = other DNA
tggctcccttgctgctgatctg

SEQ ID NO: 53465 - DNA, 22 bp, synthetic construct
  misc_feature 1..22: note = chemically synthesized
  source 1..22: mol_type = other DNA
ccttgctgctgatctggaactc

SEQ ID NO: 53466 - DNA, 22 bp, synthetic construct
  misc_feature 1..22: note = chemically synthesized
  source 1..22: mol_type = other DNA
gctgctgatctggaactcaagc

SEQ ID NO: 53467 - DNA, 22 bp, synthetic construct
  misc_feature 1..22: note = chemically synthesized
  source 1..22: mol_type = other DNA
ctgctgatctggaactcaagcc

SEQ ID NO: 53468 - DNA, 22 bp, synthetic construct
  misc_feature 1..22: note = chemically synthesized
  source 1..22: mol_type = other DNA
ctgatctggaactcaagcccca

SEQ ID NO: 53469 - DNA, 22 bp, synthetic construct
  misc_feature 1..22: note = chemically synthesized
  source 1..22: mol_type = other DNA
atctggaactcaagccccaaga

SEQ ID NO: 53470 - DNA, 22 bp, synthetic construct
  misc_feature 1..22: note = chemically synthesized
  source 1..22: mol_type = other DNA
gaactcaagccccaagaagtcc

SEQ ID NO: 53471 - DNA, 22 bp, synthetic construct
  misc_feature 1..22: note = chemically synthesized
  source 1..22: mol_type = other DNA
aagccccaagaagtccccttgg

SEQ ID NO: 53472 - DNA, 22 bp, synthetic construct
  misc_feature 1..22: note = chemically synthesized
  source 1..22: mol_type = other DNA
ggatgatctgaatatacatttg

SEQ ID NO: 53473 - DNA, 22 bp, synthetic construct
  misc_feature 1..22: note = chemically synthesized
  source 1..22: mol_type = other DNA
gatgatctgaatatacatttgg

SEQ ID NO: 53474 - DNA, 22 bp, synthetic construct
  misc_feature 1..22: note = chemically synthesized
  source 1..22: mol_type = other DNA
aatatacatttgggacagatct

SEQ ID NO: 53475 - DNA, 22 bp, synthetic construct
  misc_feature 1..22: note = chemically synthesized
  source 1..22: mol_type = other DNA
gggacagatctagggagtttct

SEQ ID NO: 53476 - DNA, 22 bp, synthetic construct
  misc_feature 1..22: note = chemically synthesized
  source 1..22: mol_type = other DNA
ggacagatctagggagtttctg

SEQ ID NO: 53477 - DNA, 22 bp, synthetic construct
  misc_feature 1..22: note = chemically synthesized
  source 1..22: mol_type = other DNA
gggagtttctgagcaacactta

SEQ ID NO: 53478 - DNA, 22 bp, synthetic construct
  misc_feature 1..22: note = chemically synthesized
  source 1..22: mol_type = other DNA
ctgagcaacacttagactgggg

SEQ ID NO: 53479 - DNA, 22 bp, synthetic construct
  misc_feature 1..22: note = chemically synthesized
  source 1..22: mol_type = other DNA
tgagcaacacttagactggggt

SEQ ID NO: 53480 - DNA, 22 bp, synthetic construct
  misc_feature 1..22: note = chemically synthesized
  source 1..22: mol_type = other DNA
agcaacacttagactggggtct

SEQ ID NO: 53481 - DNA, 22 bp, synthetic construct
  misc_feature 1..22: note = chemically synthesized
  source 1..22: mol_type = other DNA
agactggggtcttccattgatt

SEQ ID NO: 53482 - DNA, 22 bp, synthetic construct
  misc_feature 1..22: note = chemically synthesized
  source 1..22: mol_type = other DNA
gactggggtcttccattgatta

SEQ ID NO: 53483 - DNA, 22 bp, synthetic construct
  misc_feature 1..22: note = chemically synthesized
  source 1..22: mol_type = other DNA
gggtcttccattgattaaatcc

SEQ ID NO: 53484 - DNA, 22 bp, synthetic construct
  misc_feature 1..22: note = chemically synthesized
  source 1..22: mol_type = other DNA
ccattgattaaatcctacttga

SEQ ID NO: 53485 - DNA, 22 bp, synthetic construct
  misc_feature 1..22: note = chemically synthesized
  source 1..22: mol_type = other DNA
cattgattaaatcctacttgaa

SEQ ID NO: 53486 - DNA, 22 bp, synthetic construct
  misc_feature 1..22: note = chemically synthesized
  source 1..22: mol_type = other DNA
attaaatcctacttgaattcgc

SEQ ID NO: 53487 - DNA, 22 bp, synthetic construct
  misc_feature 1..22: note = chemically synthesized
  source 1..22: mol_type = other DNA
aatcctacttgaattcgctact

SEQ ID NO: 53488 - DNA, 22 bp, synthetic construct
  misc_feature 1..22: note = chemically synthesized
  source 1..22: mol_type = other DNA
cttgaattcgctactttgggac

SEQ ID NO: 53489 - DNA, 22 bp, synthetic construct
  misc_feature 1..22: note = chemically synthesized
  source 1..22: mol_type = other DNA
gaattcgctactttgggactca

SEQ ID NO: 53490 - DNA, 22 bp, synthetic construct
  misc_feature 1..22: note = chemically synthesized
  source 1..22: mol_type = other DNA
aattcgctactttgggactcaa

SEQ ID NO: 53491 - DNA, 22 bp, synthetic construct
  misc_feature 1..22: note = chemically synthesized
  source 1..22: mol_type = other DNA
gctactttgggactcaagtcta

SEQ ID NO: 53492 - DNA, 22 bp, synthetic construct
  misc_feature 1..22: note = chemically synthesized
  source 1..22: mol_type = other DNA
ctttgggactcaagtctaaggg

SEQ ID NO: 53493 - DNA, 22 bp, synthetic construct
  misc_feature 1..22: note = chemically synthesized
  source 1..22: mol_type = other DNA
tgggactcaagtctaagggact

SEQ ID NO: 53494 - DNA, 22 bp, synthetic construct
  misc_feature 1..22: note = chemically synthesized
  source 1..22: mol_type = other DNA
gggactcaagtctaagggactg

SEQ ID NO: 53495 - DNA, 22 bp, synthetic construct
  misc_feature 1..22: note = chemically synthesized
  source 1..22: mol_type = other DNA
ggactcaagtctaagggactga

SEQ ID NO: 53496 - DNA, 22 bp, synthetic construct
  misc_feature 1..22: note = chemically synthesized
  source 1..22: mol_type = other DNA
aagtctaagggactgagactga

SEQ ID NO: 53497 - DNA, 22 bp, synthetic construct
  misc_feature 1..22: note = chemically synthesized
  source 1..22: mol_type = other DNA
agggactgagactgagacagga

SEQ ID NO: 53498 - DNA, 22 bp, synthetic construct
  misc_feature 1..22: note = chemically synthesized
  source 1..22: mol_type = other DNA
agactgagacaggagagcacaa

SEQ ID NO: 53499 - DNA, 22 bp, synthetic construct
  misc_feature 1..22: note = chemically synthesized
  source 1..22: mol_type = other DNA
agacaggagagcacaagactaa

SEQ ID NO: 53500 - DNA, 22 bp, synthetic construct
  misc_feature 1..22: note = chemically synthesized
  source 1..22: mol_type = other DNA
actttggtctcttgatcttttc

SEQ ID NO: 53501 - DNA, 22 bp, synthetic construct
  misc_feature 1..22: note = chemically synthesized
  source 1..22: mol_type = other DNA
tggtctcttgatcttttcttac

SEQ ID NO: 53502 - DNA, 22 bp, synthetic construct
  misc_feature 1..22: note = chemically synthesized
  source 1..22: mol_type = other DNA
ggtctcttgatcttttcttacc

SEQ ID NO: 53503 - DNA, 22 bp, synthetic construct
  misc_feature 1..22: note = chemically synthesized
  source 1..22: mol_type = other DNA
gtctcttgatcttttcttacct

SEQ ID NO: 53504 - DNA, 22 bp, synthetic construct
  misc_feature 1..22: note = chemically synthesized
  source 1..22: mol_type = other DNA
ttgatcttttcttaccttgcaa

SEQ ID NO: 53505 - DNA, 22 bp, synthetic construct
  misc_feature 1..22: note = chemically synthesized
  source 1..22: mol_type = other DNA
gatcttttcttaccttgcaact

SEQ ID NO: 53506 - DNA, 22 bp, synthetic construct
  misc_feature 1..22: note = chemically synthesized
  source 1..22: mol_type = other DNA
atcttttcttaccttgcaactg

SEQ ID NO: 53507 - DNA, 22 bp, synthetic construct
  misc_feature 1..22: note = chemically synthesized
  source 1..22: mol_type = other DNA
ttcttaccttgcaactgtcaat

SEQ ID NO: 53508 - DNA, 22 bp, synthetic construct
  misc_feature 1..22: note = chemically synthesized
  source 1..22: mol_type = other DNA
tcttaccttgcaactgtcaatg

SEQ ID NO: 53509 - DNA, 22 bp, synthetic construct
  misc_feature 1..22: note = chemically synthesized
  source 1..22: mol_type = other DNA
cttaccttgcaactgtcaatgc

SEQ ID NO: 53510 - DNA, 22 bp, synthetic construct
  misc_feature 1..22: note = chemically synthesized
  source 1..22: mol_type = other DNA
ttaccttgcaactgtcaatgcc

SEQ ID NO: 53511 - DNA, 22 bp, synthetic construct
  misc_feature 1..22: note = chemically synthesized
  source 1..22: mol_type = other DNA
accttgcaactgtcaatgcctc

SEQ ID NO: 53512 - DNA, 22 bp, synthetic construct
  misc_feature 1..22: note = chemically synthesized
  source 1..22: mol_type = other DNA
ccttgcaactgtcaatgcctcc

SEQ ID NO: 53513 - DNA, 22 bp, synthetic construct
  misc_feature 1..22: note = chemically synthesized
  source 1..22: mol_type = other DNA
gcaactgtcaatgcctccagcc

SEQ ID NO: 53514 - DNA, 22 bp, synthetic construct
  misc_feature 1..22: note = chemically synthesized
  source 1..22: mol_type = other DNA
caactgtcaatgcctccagcca

SEQ ID NO: 53515 - DNA, 22 bp, synthetic construct
  misc_feature 1..22: note = chemically synthesized
  source 1..22: mol_type = other DNA
tcaatgcctccagccaaatgcc

SEQ ID NO: 53516 - DNA, 22 bp, synthetic construct
  misc_feature 1..22: note = chemically synthesized
  source 1..22: mol_type = other DNA
cagccaaatgcccagcacagag

SEQ ID NO: 53517 - DNA, 22 bp, synthetic construct
  misc_feature 1..22: note = chemically synthesized
  source 1..22: mol_type = other DNA
agtggatttgactcttccattc

SEQ ID NO: 53518 - DNA, 22 bp, synthetic construct
  misc_feature 1..22: note = chemically synthesized
  source 1..22: mol_type = other DNA
gactcttccattcagaaactca

SEQ ID NO: 53519 - DNA, 22 bp, synthetic construct
  misc_feature 1..22: note = chemically synthesized
  source 1..22: mol_type = other DNA
actcttccattcagaaactcat

SEQ ID NO: 53520 - DNA, 22 bp, synthetic construct
  misc_feature 1..22: note = chemically synthesized
  source 1..22: mol_type = other DNA
ttccattcagaaactcatagcg

SEQ ID NO: 53521 - DNA, 22 bp, synthetic construct
  misc_feature 1..22: note = chemically synthesized
  source 1..22: mol_type = other DNA
ccattcagaaactcatagcgat

SEQ ID NO: 53522 - DNA, 22 bp, synthetic construct
  misc_feature 1..22: note = chemically synthesized
  source 1..22: mol_type = other DNA
cattcagaaactcatagcgatt

SEQ ID NO: 53523 - DNA, 22 bp, synthetic construct
  misc_feature 1..22: note = chemically synthesized
  source 1..22: mol_type = other DNA
agaaactcatagcgattgcaca

SEQ ID NO: 53524 - DNA, 22 bp, synthetic construct
  misc_feature 1..22: note = chemically synthesized
  source 1..22: mol_type = other DNA
atagcgattgcacacttcattc

SEQ ID NO: 53525 - DNA, 22 bp, synthetic construct
  misc_feature 1..22: note = chemically synthesized
  source 1..22: mol_type = other DNA
cacacttcattctcaatcacag

SEQ ID NO: 53526 - DNA, 22 bp, synthetic construct
  misc_feature 1..22: note = chemically synthesized
  source 1..22: mol_type = other DNA
cattctcaatcacagggagctg

SEQ ID NO: 53527 - DNA, 22 bp, synthetic construct
  misc_feature 1..22: note = chemically synthesized
  source 1..22: mol_type = other DNA
attctcaatcacagggagctgg

SEQ ID NO: 53528 - DNA, 22 bp, synthetic construct
  misc_feature 1..22: note = chemically synthesized
  source 1..22: mol_type = other DNA
tcaatcacagggagctgggctt

SEQ ID NO: 53529 - DNA, 22 bp, synthetic construct
  misc_feature 1..22: note = chemically synthesized
  source 1..22: mol_type = other DNA
aatcacagggagctgggcttcc

SEQ ID NO: 53530 - DNA, 22 bp, synthetic construct
  misc_feature 1..22: note = chemically synthesized
  source 1..22: mol_type = other DNA
ggcttccttgagaaagccagcc

SEQ ID NO: 53531 - DNA, 22 bp, synthetic construct
  misc_feature 1..22: note = chemically synthesized
  source 1..22: mol_type = other DNA
ccttgagaaagccagccccaaa

SEQ ID NO: 53532 - DNA, 22 bp, synthetic construct
  misc_feature 1..22: note = chemically synthesized
  source 1..22: mol_type = other DNA
cttgagaaagccagccccaaag

SEQ ID NO: 53533 - DNA, 22 bp, synthetic construct
  misc_feature 1..22: note = chemically synthesized
  source 1..22: mol_type = other DNA
gagaaagccagccccaaaggta

SEQ ID NO: 53534 - DNA, 22 bp, synthetic construct
  misc_feature 1..22: note = chemically synthesized
  source 1..22: mol_type = other DNA
agaaagccagccccaaaggtac

SEQ ID NO: 53535 - DNA, 22 bp, synthetic construct
  misc_feature 1..22: note = chemically synthesized
  source 1..22: mol_type = other DNA
tgtttaaaaagatgaaagaaat

SEQ ID NO: 53536 - DNA, 22 bp, synthetic construct
  misc_feature 1..22: note = chemically synthesized
  source 1..22: mol_type = other DNA
aaaaagatgaaagaaatggtaa

SEQ ID NO: 53537 - DNA, 22 bp, synthetic construct
  misc_feature 1..22: note = chemically synthesized
  source 1..22: mol_type = other DNA
aaaagatgaaagaaatggtaac

SEQ ID NO: 53538 - DNA, 22 bp, synthetic construct
  misc_feature 1..22: note = chemically synthesized
  source 1..22: mol_type = other DNA
cgtccacaacatgttcacaagg

SEQ ID NO: 53539 - DNA, 22 bp, synthetic construct
  misc_feature 1..22: note = chemically synthesized
  source 1..22: mol_type = other DNA
acaaggaaactccagaagaaca

SEQ ID NO: 53540 - DNA, 22 bp, synthetic construct
  misc_feature 1..22: note = chemically synthesized
  source 1..22: mol_type = other DNA
cagaagaacagagcagtggtga

SEQ ID NO: 53541 - DNA, 22 bp, synthetic construct
  misc_feature 1..22: note = chemically synthesized
  source 1..22: mol_type = other DNA
ctgtctgtccgtgaggctgtag

SEQ ID NO: 53542 - DNA, 22 bp, synthetic construct
  misc_feature 1..22: note = chemically synthesized
  source 1..22: mol_type = other DNA
tctgtccgtgaggctgtagaac

SEQ ID NO: 53543 - DNA, 22 bp, synthetic construct
  misc_feature 1..22: note = chemically synthesized
  source 1..22: mol_type = other DNA
tccgtgaggctgtagaacacaa

SEQ ID NO: 53544 - DNA, 22 bp, synthetic construct
  misc_feature 1..22: note = chemically synthesized
  source 1..22: mol_type = other DNA
tagaacacaaggcagctcccaa

SEQ ID NO: 53545 - DNA, 22 bp, synthetic construct
  misc_feature 1..22: note = chemically synthesized
  source 1..22: mol_type = other DNA
ccaatgctgccagactctctga

SEQ ID NO: 53546 - DNA, 22 bp, synthetic construct
  misc_feature 1..22: note = chemically synthesized
  source 1..22: mol_type = other DNA
ccagactctctgaaccctggag

SEQ ID NO: 53547 - DNA, 22 bp, synthetic construct
  misc_feature 1..22: note = chemically synthesized
  source 1..22: mol_type = other DNA
tctgaaccctggagagtgtaaa

SEQ ID NO: 53548 - DNA, 22 bp, synthetic construct
  misc_feature 1..22: note = chemically synthesized
  source 1..22: mol_type = other DNA
tgaaccctggagagtgtaaacg

SEQ ID NO: 53549 - DNA, 22 bp, synthetic construct
  misc_feature 1..22: note = chemically synthesized
  source 1..22: mol_type = other DNA
aaccctggagagtgtaaacgtc

SEQ ID NO: 53550 - DNA, 22 bp, synthetic construct
  misc_feature 1..22: note = chemically synthesized
  source 1..22: mol_type = other DNA
gagagtgtaaacgtcatataag

SEQ ID NO: 53551 - DNA, 22 bp, synthetic construct
  misc_feature 1..22: note = chemically synthesized
  source 1..22: mol_type = other DNA
tgttccaaaaacctggatttaa

SEQ ID NO: 53552 - DNA, 22 bp, synthetic construct
  misc_feature 1..22: note = chemically synthesized
  source 1..22: mol_type = other DNA
caaaaacctggatttaacaatc

SEQ ID NO: 53553 - DNA, 22 bp, synthetic construct
  misc_feature 1..22: note = chemically synthesized
  source 1..22: mol_type = other DNA
gatttaacaatctgagctttgt

SEQ ID NO: 53554 - DNA, 22 bp, synthetic construct
  misc_feature 1..22: note = chemically synthesized
  source 1..22: mol_type = other DNA
aacaatctgagctttgtcatgg

SEQ ID NO: 53555 - DNA, 22 bp, synthetic construct
  misc_feature 1..22: note = chemically synthesized
  source 1..22: mol_type = other DNA
acaatctgagctttgtcatggt

SEQ ID NO: 53556 - DNA, 22 bp, synthetic construct
  misc_feature 1..22: note = chemically synthesized
  source 1..22: mol_type = other DNA
agctttgtcatggtgctttgcg

SEQ ID NO: 53557 - DNA, 22 bp, synthetic construct
  misc_feature 1..22: note = chemically synthesized
  source 1..22: mol_type = other DNA
tgtcatggtgctttgcggttgg

SEQ ID NO: 53558 - DNA, 22 bp, synthetic construct
  misc_feature 1..22: note = chemically synthesized
  source 1..22: mol_type = other DNA
gtcatggtgctttgcggttggt

SEQ ID NO: 53559 - DNA, 22 bp, synthetic construct
  misc_feature 1..22: note = chemically synthesized
  source 1..22: mol_type = other DNA
tcatggtgctttgcggttggtt

SEQ ID NO: 53560 - DNA, 22 bp, synthetic construct
  misc_feature 1..22: note = chemically synthesized
  source 1..22: mol_type = other DNA
tgcggttggttgttgtttcttt

SEQ ID NO: 53561 - DNA, 22 bp, synthetic construct
  misc_feature 1..22: note = chemically synthesized
  source 1..22: mol_type = other DNA
gcggttggttgttgtttcttta

SEQ ID NO: 53562 - DNA, 22 bp, synthetic construct
  misc_feature 1..22: note = chemically synthesized
  source 1..22: mol_type = other DNA
cggttggttgttgtttctttac

SEQ ID NO: 53563 - DNA, 22 bp, synthetic construct
  misc_feature 1..22: note = chemically synthesized
  source 1..22: mol_type = other DNA
gttgttgtttctttaccttttt

SEQ ID NO: 53564 - DNA, 22 bp, synthetic construct
  misc_feature 1..22: note = chemically synthesized
  source 1..22: mol_type = other DNA
ttgtttctttacctttttcttt

SEQ ID NO: 53565 - DNA, 22 bp, synthetic construct
  misc_feature 1..22: note = chemically synthesized
  source 1..22: mol_type = other DNA
tttctttacctttttctttgct

SEQ ID NO: 53566 - DNA, 22 bp, synthetic construct
  misc_feature 1..22: note = chemically synthesized
  source 1..22: mol_type = other DNA
ctttacctttttctttgctttt

SEQ ID NO: 53567 - DNA, 22 bp, synthetic construct
  misc_feature 1..22: note = chemically synthesized
  source 1..22: mol_type = other DNA
tttacctttttctttgctttta

SEQ ID NO: 53568 - DNA, 22 bp, synthetic construct
  misc_feature 1..22: note = chemically synthesized
  source 1..22: mol_type = other DNA
tacctttttctttgcttttaaa

SEQ ID NO: 53569 - DNA, 22 bp, synthetic construct
  misc_feature 1..22: note = chemically synthesized
  source 1..22: mol_type = other DNA
acctttttctttgcttttaaaa

SEQ ID NO: 53570 - DNA, 22 bp, synthetic construct
  misc_feature 1..22: note = chemically synthesized
  source 1..22: mol_type = other DNA
cctttttctttgcttttaaaac

SEQ ID NO: 53571 - DNA, 22 bp, synthetic construct
  misc_feature 1..22: note = chemically synthesized
  source 1..22: mol_type = other DNA
tttctttgcttttaaaaccata

SEQ ID NO: 53572 - DNA, 22 bp, synthetic construct
  misc_feature 1..22: note = chemically synthesized
  source 1..22: mol_type = other DNA
ttctttgcttttaaaaccataa

SEQ ID NO: 53573 - DNA, 22 bp, synthetic construct
  misc_feature 1..22: note = chemically synthesized
  source 1..22: mol_type = other DNA
tctttgcttttaaaaccataaa

SEQ ID NO: 53574 - DNA, 22 bp, synthetic construct
  misc_feature 1..22: note = chemically synthesized
  source 1..22: mol_type = other DNA
ctttgcttttaaaaccataaag

SEQ ID NO: 53575 - DNA, 22 bp, synthetic construct
  misc_feature 1..22: note = chemically synthesized
  source 1..22: mol_type = other DNA
tttgcttttaaaaccataaaga

SEQ ID NO: 53576 - DNA, 22 bp, synthetic construct
  misc_feature 1..22: note = chemically synthesized
  source 1..22: mol_type = other DNA
tgcttttaaaaccataaagaat

SEQ ID NO: 53577 - DNA, 22 bp, synthetic construct
  misc_feature 1..22: note = chemically synthesized
  source 1..22: mol_type = other DNA
gcttttaaaaccataaagaata

SEQ ID NO: 53578 - DNA, 22 bp, synthetic construct
  misc_feature 1..22: note = chemically synthesized
  source 1..22: mol_type = other DNA
cttttaaaaccataaagaataa

SEQ ID NO: 53579 - DNA, 22 bp, synthetic construct
  misc_feature 1..22: note = chemically synthesized
  source 1..22: mol_type = other DNA
ttaaaaccataaagaataatgt

SEQ ID NO: 53580 - DNA, 22 bp, synthetic construct
  misc_feature 1..22: note = chemically synthesized
  source 1..22: mol_type = other DNA
taaaaccataaagaataatgtt

SEQ ID NO: 53581 - DNA, 22 bp, synthetic construct
  misc_feature 1..22: note = chemically synthesized
  source 1..22: mol_type = other DNA
aaaaccataaagaataatgttt

SEQ ID NO: 53582 - DNA, 22 bp, synthetic construct
  misc_feature 1..22: note = chemically synthesized
  source 1..22: mol_type = other DNA
aaaccataaagaataatgttta

SEQ ID NO: 53583 - DNA, 22 bp, synthetic construct
  misc_feature 1..22: note = chemically synthesized
  source 1..22: mol_type = other DNA
aaatgtagagtctgagaaatgc

SEQ ID NO: 53584 - DNA, 22 bp, synthetic construct
  misc_feature 1..22: note = chemically synthesized
  source 1..22: mol_type = other DNA
aatgtagagtctgagaaatgca

SEQ ID NO: 53585 - DNA, 22 bp, synthetic construct
  misc_feature 1..22: note = chemically synthesized
  source 1..22: mol_type = other DNA
agaaatgcaattgctattgttt

SEQ ID NO: 53586 - DNA, 22 bp, synthetic construct
  misc_feature 1..22: note = chemically synthesized
  source 1..22: mol_type = other DNA
ctattgtttttatattttcaga

SEQ ID NO: 53587 - DNA, 22 bp, synthetic construct
  misc_feature 1..22: note = chemically synthesized
  source 1..22: mol_type = other DNA
ttgtttttatattttcagactt

SEQ ID NO: 53588 - DNA, 22 bp, synthetic construct
  misc_feature 1..22: note = chemically synthesized
  source 1..22: mol_type = other DNA
tttttatattttcagacttttt

SEQ ID NO: 53589 - DNA, 22 bp, synthetic construct
  misc_feature 1..22: note = chemically synthesized
  source 1..22: mol_type = other DNA
ttatattttcagactttttgta

SEQ ID NO: 53590 - DNA, 22 bp, synthetic construct
  misc_feature 1..22: note = chemically synthesized
  source 1..22: mol_type = other DNA
tatattttcagactttttgtat

SEQ ID NO: 53591 - DNA, 22 bp, synthetic construct
  misc_feature 1..22: note = chemically synthesized
  source 1..22: mol_type = other DNA
atattttcagactttttgtatg

SEQ ID NO: 53592 - DNA, 22 bp, synthetic construct
  misc_feature 1..22: note = chemically synthesized
  source 1..22: mol_type = other DNA
tattttcagactttttgtatgc

SEQ ID NO: 53593 - DNA, 22 bp, synthetic construct
  misc_feature 1..22: note = chemically synthesized
  source 1..22: mol_type = other DNA
tcagactttttgtatgcttctt

SEQ ID NO: 53594 - DNA, 22 bp, synthetic construct
  misc_feature 1..22: note = chemically synthesized
  source 1..22: mol_type = other DNA
cagactttttgtatgcttcttt

SEQ ID NO: 53595 - DNA, 22 bp, synthetic construct
  misc_feature 1..22: note = chemically synthesized
  source 1..22: mol_type = other DNA
agactttttgtatgcttctttc

SEQ ID NO: 53596 - DNA, 22 bp, synthetic construct
  misc_feature 1..22: note = chemically synthesized
  source 1..22: mol_type = other DNA
tttgtatgcttctttcactaat

SEQ ID NO: 53597 - DNA, 22 bp, synthetic construct
  misc_feature 1..22: note = chemically synthesized
  source 1..22: mol_type = other DNA
ttgtatgcttctttcactaatt

SEQ ID NO: 53598 - DNA, 22 bp, synthetic construct
  misc_feature 1..22: note = chemically synthesized
  source 1..22: mol_type = other DNA
tgtatgcttctttcactaatta

SEQ ID NO: 53599 - DNA, 22 bp, synthetic construct
  misc_feature 1..22: note = chemically synthesized
  source 1..22: mol_type = other DNA
gtatgcttctttcactaattac

SEQ ID NO: 53600 - DNA, 22 bp, synthetic construct
  misc_feature 1..22: note = chemically synthesized
  source 1..22: mol_type = other DNA
tatgcttctttcactaattaca

SEQ ID NO: 53601 - DNA, 22 bp, synthetic construct
  misc_feature 1..22: note = chemically synthesized
  source 1..22: mol_type = other DNA
ctttcactaattacatcatatc

SEQ ID NO: 53602 - DNA, 22 bp, synthetic construct
  misc_feature 1..22: note = chemically synthesized
  source 1..22: mol_type = other DNA
tttcactaattacatcatatca

SEQ ID NO: 53603 - DNA, 22 bp, synthetic construct
  misc_feature 1..22: note = chemically synthesized
  source 1..22: mol_type = other DNA
tcactaattacatcatatcaca

SEQ ID NO: 53604 - DNA, 22 bp, synthetic construct
  misc_feature 1..22: note = chemically synthesized
  source 1..22: mol_type = other DNA
cactaattacatcatatcacaa

SEQ ID NO: 53605 - DNA, 22 bp, synthetic construct
  misc_feature 1..22: note = chemically synthesized
  source 1..22: mol_type = other DNA
actaattacatcatatcacaaa

SEQ ID NO: 53606 - DNA, 22 bp, synthetic construct
  misc_feature 1..22: note = chemically synthesized
  source 1..22: mol_type = other DNA
attacatcatatcacaaaattt

SEQ ID NO: 53607 - DNA, 22 bp, synthetic construct
  misc_feature 1..22: note = chemically synthesized
  source 1..22: mol_type = other DNA
catcatatcacaaaatttcaca

SEQ ID NO: 53608 - DNA, 22 bp, synthetic construct
  misc_feature 1..22: note = chemically synthesized
  source 1..22: mol_type = other DNA
cacaccctgattttttcactca

SEQ ID NO: 53609 - DNA, 22 bp, synthetic construct
  misc_feature 1..22: note = chemically synthesized
  source 1..22: mol_type = other DNA
acaccctgattttttcactcaa

SEQ ID NO: 53610 - DNA, 22 bp, synthetic construct
  misc_feature 1..22: note = chemically synthesized
  source 1..22: mol_type = other DNA
attttttcactcaacattacat

SEQ ID NO: 53611 - DNA, 22 bp, synthetic construct
  misc_feature 1..22: note = chemically synthesized
  source 1..22: mol_type = other DNA
tttcactcaacattacataatg

SEQ ID NO: 53612 - DNA, 22 bp, synthetic construct
  misc_feature 1..22: note = chemically synthesized
  source 1..22: mol_type = other DNA
ttcactcaacattacataatga

SEQ ID NO: 53613 - DNA, 22 bp, synthetic construct
  misc_feature 1..22: note = chemically synthesized
  source 1..22: mol_type = other DNA
tcactcaacattacataatgag

SEQ ID NO: 53614 - DNA, 22 bp, synthetic construct
  misc_feature 1..22: note = chemically synthesized
  source 1..22: mol_type = other DNA
cactcaacattacataatgagt

SEQ ID NO: 53615 - DNA, 22 bp, synthetic construct
  misc_feature 1..22: note = chemically synthesized
  source 1..22: mol_type = other DNA
actcaacattacataatgagtt

SEQ ID NO: 53616 - DNA, 22 bp, synthetic construct
  misc_feature 1..22: note = chemically synthesized
  source 1..22: mol_type = other DNA
aacattacataatgagttttgt

SEQ ID NO: 53617 - DNA, 22 bp, synthetic construct
  misc_feature 1..22: note = chemically synthesized
  source 1..22: mol_type = other DNA
cataatgagttttgtatagtgc

SEQ ID NO: 53618 - DNA, 22 bp, synthetic construct
  misc_feature 1..22: note = chemically synthesized
  source 1..22: mol_type = other DNA
tgtatagtgctatgatcttcat

SEQ ID NO: 53619 - DNA, 22 bp, synthetic construct
  misc_feature 1..22: note = chemically synthesized
  source 1..22: mol_type = other DNA
gtatagtgctatgatcttcata

SEQ ID NO: 53620 - DNA, 22 bp, synthetic construct
  misc_feature 1..22: note = chemically synthesized
  source 1..22: mol_type = other DNA
tatagtgctatgatcttcataa

SEQ ID NO: 53621 - DNA, 22 bp, synthetic construct
  misc_feature 1..22: note = chemically synthesized
  source 1..22: mol_type = other DNA
tgatcttcataactaatatttt

SEQ ID NO: 53622 - DNA, 22 bp, synthetic construct
  misc_feature 1..22: note = chemically synthesized
  source 1..22: mol_type = other DNA
cataactaatattttaaaggag

SEQ ID NO: 53623 - DNA, 22 bp, synthetic construct
  misc_feature 1..22: note = chemically synthesized
  source 1..22: mol_type = other DNA
ataactaatattttaaaggaga

SEQ ID NO: 53624 - DNA, 22 bp, synthetic construct
  misc_feature 1..22: note = chemically synthesized
  source 1..22: mol_type = other DNA
atattttaaaggagagctactg

SEQ ID NO: 53625 - DNA, 22 bp, synthetic construct
  misc_feature 1..22: note = chemically synthesized
  source 1..22: mol_type = other DNA
taaaggagagctactgattaat

SEQ ID NO: 53626 - DNA, 22 bp, synthetic construct
  misc_feature 1..22: note = chemically synthesized
  source 1..22: mol_type = other DNA
aaaggagagctactgattaatg

SEQ ID NO: 53627 - DNA, 22 bp, synthetic construct
  misc_feature 1..22: note = chemically synthesized
  source 1..22: mol_type = other DNA
aaggagagctactgattaatga

SEQ ID NO: 53628 - DNA, 22 bp, synthetic construct
  misc_feature 1..22: note = chemically synthesized
  source 1..22: mol_type = other DNA
ctgattaatgagcatgaggttt

SEQ ID NO: 53629 - DNA, 22 bp, synthetic construct
  misc_feature 1..22: note = chemically synthesized
  source 1..22: mol_type = other DNA
attaatgagcatgaggtttcct

SEQ ID NO: 53630 - DNA, 22 bp, synthetic construct
  misc_feature 1..22: note = chemically synthesized
  source 1..22: mol_type = other DNA
atgagcatgaggtttcctttgg

SEQ ID NO: 53631 - DNA, 22 bp, synthetic construct
  misc_feature 1..22: note = chemically synthesized
  source 1..22: mol_type = other DNA
cctttggggatgaggaaaatat

SEQ ID NO: 53632 - DNA, 22 bp, synthetic construct
  misc_feature 1..22: note = chemically synthesized
  source 1..22: mol_type = other DNA
ctttggggatgaggaaaatatt

SEQ ID NO: 53633 - DNA, 22 bp, synthetic construct
  misc_feature 1..22: note = chemically synthesized
  source 1..22: mol_type = other DNA
tggggatgaggaaaatattctg

SEQ ID NO: 53634 - DNA, 22 bp, synthetic construct
  misc_feature 1..22: note = chemically synthesized
  source 1..22: mol_type = other DNA
ggggatgaggaaaatattctgg

SEQ ID NO: 53635 - DNA, 22 bp, synthetic construct
  misc_feature 1..22: note = chemically synthesized
  source 1..22: mol_type = other DNA
gggatgaggaaaatattctgga

SEQ ID NO: 53636 - DNA, 22 bp, synthetic construct
  misc_feature 1..22: note = chemically synthesized
  source 1..22: mol_type = other DNA
tggaaatatgatgatggttgca

SEQ ID NO: 53637 - DNA, 22 bp, synthetic construct
  misc_feature 1..22: note = chemically synthesized
  source 1..22: mol_type = other DNA
gaaatatgatgatggttgcaca

SEQ ID NO: 53638 - DNA, 22 bp, synthetic construct
  misc_feature 1..22: note = chemically synthesized
  source 1..22: mol_type = other DNA
cacaccactgtgaatgtactaa

SEQ ID NO: 53639 - DNA, 22 bp, synthetic construct
  misc_feature 1..22: note = chemically synthesized
  source 1..22: mol_type = other DNA
tgaatgtactaaatgccacttg

SEQ ID NO: 53640 - DNA, 22 bp, synthetic construct
  misc_feature 1..22: note = chemically synthesized
  source 1..22: mol_type = other DNA
aatgccacttggtggtaccctg

SEQ ID NO: 53641 - DNA, 22 bp, synthetic construct
  misc_feature 1..22: note = chemically synthesized
  source 1..22: mol_type = other DNA
ggtggtaccctgcaaaaatggt

SEQ ID NO: 53642 - DNA, 22 bp, synthetic construct
  misc_feature 1..22: note = chemically synthesized
  source 1..22: mol_type = other DNA
gtggtaccctgcaaaaatggtt

SEQ ID NO: 53643 - DNA, 22 bp, synthetic construct
  misc_feature 1..22: note = chemically synthesized
  source 1..22: mol_type = other DNA
caaaaatggttaaaatagtaac

SEQ ID NO: 53644 - DNA, 22 bp, synthetic construct
  misc_feature 1..22: note = chemically synthesized
  source 1..22: mol_type = other DNA
aaatagtaactcttacgctgtg

SEQ ID NO: 53645 - DNA, 22 bp, synthetic construct
  misc_feature 1..22: note = chemically synthesized
  source 1..22: mol_type = other DNA
ttacgctgtgtacattttattg

SEQ ID NO: 53646 - DNA, 22 bp, synthetic construct
  misc_feature 1..22: note = chemically synthesized
  source 1..22: mol_type = other DNA
acgctgtgtacattttattgca

SEQ ID NO: 53647 - DNA, 22 bp, synthetic construct
  misc_feature 1..22: note = chemically synthesized
  source 1..22: mol_type = other DNA
cgctgtgtacattttattgcaa

SEQ ID NO: 53648 - DNA, 22 bp, synthetic construct
  misc_feature 1..22: note = chemically synthesized
  source 1..22: mol_type = other DNA
tgtacattttattgcaataaaa

SEQ ID NO: 53649 - DNA, 22 bp, synthetic construct
  misc_feature 1..22: note = chemically synthesized
  source 1..22: mol_type = other DNA
tattgcaataaaaaagaatagt

SEQ ID NO: 53650 - DNA, 22 bp, synthetic construct
  misc_feature 1..22: note = chemically synthesized
  source 1..22: mol_type = other DNA
attgcaataaaaaagaatagtc

SEQ ID NO: 53651 - DNA, 22 bp, synthetic construct
  misc_feature 1..22: note = chemically synthesized
  source 1..22: mol_type = other DNA
ttgcaataaaaaagaatagtca

SEQ ID NO: 53652 - DNA, 22 bp, synthetic construct
  misc_feature 1..22: note = chemically synthesized
  source 1..22: mol_type = other DNA
caataaaaaagaatagtcatca

SEQ ID NO: 53653 - DNA, 22 bp, synthetic construct
  misc_feature 1..22: note = chemically synthesized
  source 1..22: mol_type = other DNA
actaagcattatcctttccagg

SEQ ID NO: 53654 - DNA, 22 bp, synthetic construct
  misc_feature 1..22: note = chemically synthesized
  source 1..22: mol_type = other DNA
ctaagcattatcctttccaggc

SEQ ID NO: 53655 - DNA, 22 bp, synthetic construct
  misc_feature 1..22: note = chemically synthesized
  source 1..22: mol_type = other DNA
agcattatcctttccaggcaca

SEQ ID NO: 53656 - DNA, 22 bp, synthetic construct
  misc_feature 1..22: note = chemically synthesized
  source 1..22: mol_type = other DNA
tcctttccaggcacaagcttat

SEQ ID NO: 53657 - DNA, 22 bp, synthetic construct
  misc_feature 1..22: note = chemically synthesized
  source 1..22: mol_type = other DNA
tccaggcacaagcttataatgt

SEQ ID NO: 53658 - DNA, 22 bp, synthetic construct
  misc_feature 1..22: note = chemically synthesized
  source 1..22: mol_type = other DNA
ccaggcacaagcttataatgtg

SEQ ID NO: 53659 - DNA, 22 bp, synthetic construct
  misc_feature 1..22: note = chemically synthesized
  source 1..22: mol_type = other DNA
caggcacaagcttataatgtgg

SEQ ID NO: 53660 - DNA, 22 bp, synthetic construct
  misc_feature 1..22: note = chemically synthesized
  source 1..22: mol_type = other DNA
ataatgtggtgtatctcacttc

SEQ ID NO: 53661 - DNA, 22 bp, synthetic construct
  misc_feature 1..22: note = chemically synthesized
  source 1..22: mol_type = other DNA
taatgtggtgtatctcacttca

SEQ ID NO: 53662 - DNA, 22 bp, synthetic construct
  misc_feature 1..22: note = chemically synthesized
  source 1..22: mol_type = other DNA
acttcatcctcacaacagtcct

SEQ ID NO: 53663 - DNA, 22 bp, synthetic construct
  misc_feature 1..22: note = chemically synthesized
  source 1..22: mol_type = other DNA
catcctcacaacagtcctatga

SEQ ID NO: 53664 - DNA, 22 bp, synthetic construct
  misc_feature 1..22: note = chemically synthesized
  source 1..22: mol_type = other DNA
atcctcacaacagtcctatgaa

SEQ ID NO: 53665 - DNA, 22 bp, synthetic construct
  misc_feature 1..22: note = chemically synthesized
  source 1..22: mol_type = other DNA
acaacagtcctatgaaacaggc

SEQ ID NO: 53666 - DNA, 22 bp, synthetic construct
  misc_feature 1..22: note = chemically synthesized
  source 1..22: mol_type = other DNA
tgaaacaggcagttccatcact

SEQ ID NO: 53667 - DNA, 22 bp, synthetic construct
  misc_feature 1..22: note = chemically synthesized
  source 1..22: mol_type = other DNA
catcactcctgctctacagtta

SEQ ID NO: 53668 - DNA, 22 bp, synthetic construct
  misc_feature 1..22: note = chemically synthesized
  source 1..22: mol_type = other DNA
ctgctctacagttaaggaaact

SEQ ID NO: 53669 - DNA, 22 bp, synthetic construct
  misc_feature 1..22: note = chemically synthesized
  source 1..22: mol_type = other DNA
ctctacagttaaggaaactgag

SEQ ID NO: 53670 - DNA, 22 bp, synthetic construct
  misc_feature 1..22: note = chemically synthesized
  source 1..22: mol_type = other DNA
tacagttaaggaaactgaggtg

SEQ ID NO: 53671 - DNA, 22 bp, synthetic construct
  misc_feature 1..22: note = chemically synthesized
  source 1..22: mol_type = other DNA
cagttaaggaaactgaggtgta

SEQ ID NO: 53672 - DNA, 22 bp, synthetic construct
  misc_feature 1..22: note = chemically synthesized
  source 1..22: mol_type = other DNA
aggaaactgaggtgtaaggagg

SEQ ID NO: 53673 - DNA, 22 bp, synthetic construct
  misc_feature 1..22: note = chemically synthesized
  source 1..22: mol_type = other DNA
aggtgtaaggaggttgtctagt

SEQ ID NO: 53674 - DNA, 22 bp, synthetic construct
  misc_feature 1..22: note = chemically synthesized
  source 1..22: mol_type = other DNA
tctagttcaacctgagcctggg

SEQ ID NO: 53675 - DNA, 22 bp, synthetic construct
  misc_feature 1..22: note = chemically synthesized
  source 1..22: mol_type = other DNA
gttcaacctgagcctgggtctg

SEQ ID NO: 53676 - DNA, 22 bp, synthetic construct
  misc_feature 1..22: note = chemically synthesized
  source 1..22: mol_type = other DNA
aacctgagcctgggtctgcgga

SEQ ID NO: 53677 - DNA, 22 bp, synthetic construct
  misc_feature 1..22: note = chemically synthesized
  source 1..22: mol_type = other DNA
agcctgggtctgcggagtcact

SEQ ID NO: 53678 - DNA, 22 bp, synthetic construct
  misc_feature 1..22: note = chemically synthesized
  source 1..22: mol_type = other DNA
ggtctgcggagtcactgcccaa

SEQ ID NO: 53679 - DNA, 22 bp, synthetic construct
  misc_feature 1..22: note = chemically synthesized
  source 1..22: mol_type = other DNA
cggagtcactgcccaaatgctt

SEQ ID NO: 53680 - DNA, 22 bp, synthetic construct
  misc_feature 1..22: note = chemically synthesized
  source 1..22: mol_type = other DNA
cccaaatgcttcctccccgtgc

SEQ ID NO: 53681 - DNA, 22 bp, synthetic construct
  misc_feature 1..22: note = chemically synthesized
  source 1..22: mol_type = other DNA
cctccccgtgcgcgttggcccc

SEQ ID NO: 53682 - DNA, 22 bp, synthetic construct
  misc_feature 1..22: note = chemically synthesized
  source 1..22: mol_type = other DNA
ctccccgtgcgcgttggccccc

SEQ ID NO: 53683 - DNA, 22 bp, synthetic construct
  misc_feature 1..22: note = chemically synthesized
  source 1..22: mol_type = other DNA
cccgtgcgcgttggcccccctc

SEQ ID NO: 53684 - DNA, 22 bp, synthetic construct
  misc_feature 1..22: note = chemically synthesized
  source 1..22: mol_type = other DNA
gcccccctcttgcttccaaccc

SEQ ID NO: 53685 - DNA, 22 bp, synthetic construct
  misc_feature 1..22: note = chemically synthesized
  source 1..22: mol_type = other DNA
ttgcttccaaccctccacatct

SEQ ID NO: 53686 - DNA, 22 bp, synthetic construct
  misc_feature 1..22: note = chemically synthesized
  source 1..22: mol_type = other DNA
gcttccaaccctccacatcttt

SEQ ID NO: 53687 - DNA, 22 bp, synthetic construct
  misc_feature 1..22: note = chemically synthesized
  source 1..22: mol_type = other DNA
cttccaaccctccacatctttg

SEQ ID NO: 53688 - DNA, 22 bp, synthetic construct
  misc_feature 1..22: note = chemically synthesized
  source 1..22: mol_type = other DNA
ccaaccctccacatctttgttc

SEQ ID NO: 53689 - DNA, 22 bp, synthetic construct
  misc_feature 1..22: note = chemically synthesized
  source 1..22: mol_type = other DNA
caaccctccacatctttgttca

SEQ ID NO: 53690 - DNA, 22 bp, synthetic construct
  misc_feature 1..22: note = chemically synthesized
  source 1..22: mol_type = other DNA
cacatctttgttcataaagttc

SEQ ID NO: 53691 - DNA, 22 bp, synthetic construct
  misc_feature 1..22: note = chemically synthesized
  source 1..22: mol_type = other DNA
tgttcataaagttcattcttat

SEQ ID NO: 53692 - DNA, 22 bp, synthetic construct
  misc_feature 1..22: note = chemically synthesized
  source 1..22: mol_type = other DNA
gttcataaagttcattcttatt

SEQ ID NO: 53693 - DNA, 22 bp, synthetic construct
  misc_feature 1..22: note = chemically synthesized
  source 1..22: mol_type = other DNA
ttcataaagttcattcttattc

SEQ ID NO: 53694 - DNA, 22 bp, synthetic construct
  misc_feature 1..22: note = chemically synthesized
  source 1..22: mol_type = other DNA
ataaagttcattcttattcctt

SEQ ID NO: 53695 - DNA, 22 bp, synthetic construct
  misc_feature 1..22: note = chemically synthesized
  source 1..22: mol_type = other DNA
attcttattccttaatattttc

SEQ ID NO: 53696 - DNA, 22 bp, synthetic construct
  misc_feature 1..22: note = chemically synthesized
  source 1..22: mol_type = other DNA
ttattccttaatattttctgag

SEQ ID NO: 53697 - DNA, 22 bp, synthetic construct
  misc_feature 1..22: note = chemically synthesized
  source 1..22: mol_type = other DNA
attccttaatattttctgagcc

SEQ ID NO: 53698 - DNA, 22 bp, synthetic construct
  misc_feature 1..22: note = chemically synthesized
  source 1..22: mol_type = other DNA
ttccttaatattttctgagcct

SEQ ID NO: 53699 - DNA, 22 bp, synthetic construct
  misc_feature 1..22: note = chemically synthesized
  source 1..22: mol_type = other DNA
cttaatattttctgagcctaag

SEQ ID NO: 53700 - DNA, 22 bp, synthetic construct
  misc_feature 1..22: note = chemically synthesized
  source 1..22: mol_type = other DNA
aatattttctgagcctaagttc

SEQ ID NO: 53701 - DNA, 22 bp, synthetic construct
  misc_feature 1..22: note = chemically synthesized
  source 1..22: mol_type = other DNA
atattttctgagcctaagttcc

SEQ ID NO: 53702 - DNA, 22 bp, synthetic construct
  misc_feature 1..22: note = chemically synthesized
  source 1..22: mol_type = other DNA
tctgagcctaagttcccataaa

SEQ ID NO: 53703 - DNA, 22 bp, synthetic construct
  misc_feature 1..22: note = chemically synthesized
  source 1..22: mol_type = other DNA
ctgagcctaagttcccataaat

SEQ ID NO: 53704 - DNA, 22 bp, synthetic construct
  misc_feature 1..22: note = chemically synthesized
  source 1..22: mol_type = other DNA
tgagcctaagttcccataaatt

SEQ ID NO: 53705 - DNA, 22 bp, synthetic construct
  misc_feature 1..22: note = chemically synthesized
  source 1..22: mol_type = other DNA
agcctaagttcccataaattat

SEQ ID NO: 53706 - DNA, 22 bp, synthetic construct
  misc_feature 1..22: note = chemically synthesized
  source 1..22: mol_type = other DNA
agttcccataaattatatagac

SEQ ID NO: 53707 - DNA, 22 bp, synthetic construct
  misc_feature 1..22: note = chemically synthesized
  source 1..22: mol_type = other DNA
ccataaattatatagacatatt

SEQ ID NO: 53708 - DNA, 22 bp, synthetic construct
  misc_feature 1..22: note = chemically synthesized
  source 1..22: mol_type = other DNA
tatagacatatttctgtctccc

SEQ ID NO: 53709 - DNA, 22 bp, synthetic construct
  misc_feature 1..22: note = chemically synthesized
  source 1..22: mol_type = other DNA
ctgtctcccaataacactgcca

SEQ ID NO: 53710 - DNA, 22 bp, synthetic construct
  misc_feature 1..22: note = chemically synthesized
  source 1..22: mol_type = other DNA
tgtctcccaataacactgccaa

SEQ ID NO: 53711 - DNA, 22 bp, synthetic construct
  misc_feature 1..22: note = chemically synthesized
  source 1..22: mol_type = other DNA
tctcccaataacactgccaatt

SEQ ID NO: 53712 - DNA, 22 bp, synthetic construct
  misc_feature 1..22: note = chemically synthesized
  source 1..22: mol_type = other DNA
ccaataacactgccaatttatt

SEQ ID NO: 53713 - DNA, 22 bp, synthetic construct
  misc_feature 1..22: note = chemically synthesized
  source 1..22: mol_type = other DNA
ccaatttattttctagaaggtt

SEQ ID NO: 53714 - DNA, 22 bp, synthetic construct
  misc_feature 1..22: note = chemically synthesized
  source 1..22: mol_type = other DNA
attttctagaaggttatgacag

SEQ ID NO: 53715 - DNA, 22 bp, synthetic construct
  misc_feature 1..22: note = chemically synthesized
  source 1..22: mol_type = other DNA
ttttctagaaggttatgacagt

SEQ ID NO: 53716 - DNA, 22 bp, synthetic construct
  misc_feature 1..22: note = chemically synthesized
  source 1..22: mol_type = other DNA
tctagaaggttatgacagtgta

SEQ ID NO: 53717 - DNA, 22 bp, synthetic construct
  misc_feature 1..22: note = chemically synthesized
  source 1..22: mol_type = other DNA
ctagaaggttatgacagtgtaa

SEQ ID NO: 53718 - DNA, 22 bp, synthetic construct
  misc_feature 1..22: note = chemically synthesized
  source 1..22: mol_type = other DNA
tagaaggttatgacagtgtaaa

SEQ ID NO: 53719 - DNA, 22 bp, synthetic construct
  misc_feature 1..22: note = chemically synthesized
  source 1..22: mol_type = other DNA
gaaggttatgacagtgtaaaat

SEQ ID NO: 53720 - DNA, 22 bp, synthetic construct
  misc_feature 1..22: note = chemically synthesized
  source 1..22: mol_type = other DNA
tgacagtgtaaaatgtcactag

SEQ ID NO: 53721 - DNA, 22 bp, synthetic construct
  misc_feature 1..22: note = chemically synthesized
  source 1..22: mol_type = other DNA
gaaaacaatcacttcaccacac

SEQ ID NO: 53722 - DNA, 22 bp, synthetic construct
  misc_feature 1..22: note = chemically synthesized
  source 1..22: mol_type = other DNA
caccacacttgtatgagtgttc

SEQ ID NO: 53723 - DNA, 22 bp, synthetic construct
  misc_feature 1..22: note = chemically synthesized
  source 1..22: mol_type = other DNA
accacacttgtatgagtgttca

SEQ ID NO: 53724 - DNA, 22 bp, synthetic construct
  misc_feature 1..22: note = chemically synthesized
  source 1..22: mol_type = other DNA
gtatgagtgttcaatttttaaa

SEQ ID NO: 53725 - DNA, 22 bp, synthetic construct
  misc_feature 1..22: note = chemically synthesized
  source 1..22: mol_type = other DNA
tatgagtgttcaatttttaaat

SEQ ID NO: 53726 - DNA, 22 bp, synthetic construct
  misc_feature 1..22: note = chemically synthesized
  source 1..22: mol_type = other DNA
aatttttaaatattagctaatc

SEQ ID NO: 53727 - DNA, 22 bp, synthetic construct
  misc_feature 1..22: note = chemically synthesized
  source 1..22: mol_type = other DNA
ttaaatattagctaatctaaca

SEQ ID NO: 53728 - DNA, 22 bp, synthetic construct
  misc_feature 1..22: note = chemically synthesized
  source 1..22: mol_type = other DNA
taaatattagctaatctaacag

SEQ ID NO: 53729 - DNA, 22 bp, synthetic construct
  misc_feature 1..22: note = chemically synthesized
  source 1..22: mol_type = other DNA
aaatattagctaatctaacagg

SEQ ID NO: 53730 - DNA, 22 bp, synthetic construct
  misc_feature 1..22: note = chemically synthesized
  source 1..22: mol_type = other DNA
aatattagctaatctaacaggt

SEQ ID NO: 53731 - DNA, 22 bp, synthetic construct
  misc_feature 1..22: note = chemically synthesized
  source 1..22: mol_type = other DNA
gctaatctaacaggttgaaatt

SEQ ID NO: 53732 - DNA, 22 bp, synthetic construct
  misc_feature 1..22: note = chemically synthesized
  source 1..22: mol_type = other DNA
atctaacaggttgaaattgtcc

SEQ ID NO: 53733 - DNA, 22 bp, synthetic construct
  misc_feature 1..22: note = chemically synthesized
  source 1..22: mol_type = other DNA
acaggttgaaattgtcctgatt

SEQ ID NO: 53734 - DNA, 22 bp, synthetic construct
  misc_feature 1..22: note = chemically synthesized
  source 1..22: mol_type = other DNA
aaattgtcctgattcattttct

SEQ ID NO: 53735 - DNA, 22 bp, synthetic construct
  misc_feature 1..22: note = chemically synthesized
  source 1..22: mol_type = other DNA
tcctgattcattttctaattta

SEQ ID NO: 53736 - DNA, 22 bp, synthetic construct
  misc_feature 1..22: note = chemically synthesized
  source 1..22: mol_type = other DNA
attcattttctaatttatactt

SEQ ID NO: 53737 - DNA, 22 bp, synthetic construct
  misc_feature 1..22: note = chemically synthesized
  source 1..22: mol_type = other DNA
attttctaatttatacttcttt

SEQ ID NO: 53738 - DNA, 22 bp, synthetic construct
  misc_feature 1..22: note = chemically synthesized
  source 1..22: mol_type = other DNA
tctaatttatacttctttgaca

SEQ ID NO: 53739 - DNA, 22 bp, synthetic construct
  misc_feature 1..22: note = chemically synthesized
  source 1..22: mol_type = other DNA
ctaatttatacttctttgacaa

SEQ ID NO: 53740 - DNA, 22 bp, synthetic construct
  misc_feature 1..22: note = chemically synthesized
  source 1..22: mol_type = other DNA
taatttatacttctttgacaat

SEQ ID NO: 53741 - DNA, 22 bp, synthetic construct
  misc_feature 1..22: note = chemically synthesized
  source 1..22: mol_type = other DNA
atttatacttctttgacaattt

SEQ ID NO: 53742 - DNA, 22 bp, synthetic construct
  misc_feature 1..22: note = chemically synthesized
  source 1..22: mol_type = other DNA
atacttctttgacaatttggga

SEQ ID NO: 53743 - DNA, 22 bp, synthetic construct
  misc_feature 1..22: note = chemically synthesized
  source 1..22: mol_type = other DNA
tacttctttgacaatttgggag

SEQ ID NO: 53744 - DNA, 22 bp, synthetic construct
  misc_feature 1..22: note = chemically synthesized
  source 1..22: mol_type = other DNA
ctttgacaatttgggagagtga

SEQ ID NO: 53745 - DNA, 22 bp, synthetic construct
  misc_feature 1..22: note = chemically synthesized
  source 1..22: mol_type = other DNA
tttgacaatttgggagagtgaa

SEQ ID NO: 53746 - DNA, 22 bp, synthetic construct
  misc_feature 1..22: note = chemically synthesized
  source 1..22: mol_type = other DNA
tgacaatttgggagagtgaaga

SEQ ID NO: 53747 - DNA, 22 bp, synthetic construct
  misc_feature 1..22: note = chemically synthesized
  source 1..22: mol_type = other DNA
gacaatttgggagagtgaagat

SEQ ID NO: 53748 - DNA, 22 bp, synthetic construct
  misc_feature 1..22: note = chemically synthesized
  source 1..22: mol_type = other DNA
acaatttgggagagtgaagatt

SEQ ID NO: 53749 - DNA, 22 bp, synthetic construct
  misc_feature 1..22: note = chemically synthesized
  source 1..22: mol_type = other DNA
gggagagtgaagattctcctgg

SEQ ID NO: 53750 - DNA, 22 bp, synthetic construct
  misc_feature 1..22: note = chemically synthesized
  source 1..22: mol_type = other DNA
ggagagtgaagattctcctggt

SEQ ID NO: 53751 - DNA, 22 bp, synthetic construct
  misc_feature 1..22: note = chemically synthesized
  source 1..22: mol_type = other DNA
tcctggttgtgtttattctttt

SEQ ID NO: 53752 - DNA, 22 bp, synthetic construct
  misc_feature 1..22: note = chemically synthesized
  source 1..22: mol_type = other DNA
ctggttgtgtttattcttttgt

SEQ ID NO: 53753 - DNA, 22 bp, synthetic construct
  misc_feature 1..22: note = chemically synthesized
  source 1..22: mol_type = other DNA
gttgtgtttattcttttgtgaa

SEQ ID NO: 53754 - DNA, 22 bp, synthetic construct
  misc_feature 1..22: note = chemically synthesized
  source 1..22: mol_type = other DNA
tgtttattcttttgtgaaaaac

SEQ ID NO: 53755 - DNA, 22 bp, synthetic construct
  misc_feature 1..22: note = chemically synthesized
  source 1..22: mol_type = other DNA
attcttttgtgaaaaactgctt

SEQ ID NO: 53756 - DNA, 22 bp, synthetic construct
  misc_feature 1..22: note = chemically synthesized
  source 1..22: mol_type = other DNA
ttcttttgtgaaaaactgcttt

SEQ ID NO: 53757 - DNA, 22 bp, synthetic construct
  misc_feature 1..22: note = chemically synthesized
  source 1..22: mol_type = other DNA
ttttgtgaaaaactgctttatt

SEQ ID NO: 53758 - DNA, 22 bp, synthetic construct
  misc_feature 1..22: note = chemically synthesized
  source 1..22: mol_type = other DNA
ttgtgaaaaactgctttatttt

SEQ ID NO: 53759 - DNA, 22 bp, synthetic construct
  misc_feature 1..22: note = chemically synthesized
  source 1..22: mol_type = other DNA
tgtgaaaaactgctttattttc

SEQ ID NO: 53760 - DNA, 22 bp, synthetic construct
  misc_feature 1..22: note = chemically synthesized
  source 1..22: mol_type = other DNA
gtgaaaaactgctttattttct

SEQ ID NO: 53761 - DNA, 22 bp, synthetic construct
  misc_feature 1..22: note = chemically synthesized
  source 1..22: mol_type = other DNA
tgaaaaactgctttattttctt

SEQ ID NO: 53762 - DNA, 22 bp, synthetic construct
  misc_feature 1..22: note = chemically synthesized
  source 1..22: mol_type = other DNA
ctttattttctttgccaaattc

SEQ ID NO: 53763 - DNA, 22 bp, synthetic construct
  misc_feature 1..22: note = chemically synthesized
  source 1..22: mol_type = other DNA
tattttctttgccaaattcaaa

SEQ ID NO: 53764 - DNA, 22 bp, synthetic construct
  misc_feature 1..22: note = chemically synthesized
  source 1..22: mol_type = other DNA
attttctttgccaaattcaaat

SEQ ID NO: 53765 - DNA, 22 bp, synthetic construct
  misc_feature 1..22: note = chemically synthesized
  source 1..22: mol_type = other DNA
ttttctttgccaaattcaaata

SEQ ID NO: 53766 - DNA, 22 bp, synthetic construct
  misc_feature 1..22: note = chemically synthesized
  source 1..22: mol_type = other DNA
tctttgccaaattcaaatagaa

SEQ ID NO: 53767 - DNA, 22 bp, synthetic construct
  misc_feature 1..22: note = chemically synthesized
  source 1..22: mol_type = other DNA
ctttgccaaattcaaatagaac

SEQ ID NO: 53768 - DNA, 22 bp, synthetic construct
  misc_feature 1..22: note = chemically synthesized
  source 1..22: mol_type = other DNA
tttgccaaattcaaatagaacg

SEQ ID NO: 53769 - DNA, 22 bp, synthetic construct
  misc_feature 1..22: note = chemically synthesized
  source 1..22: mol_type = other DNA
tgccaaattcaaatagaacggt

SEQ ID NO: 53770 - DNA, 22 bp, synthetic construct
  misc_feature 1..22: note = chemically synthesized
  source 1..22: mol_type = other DNA
gccaaattcaaatagaacggtt

SEQ ID NO: 53771 - DNA, 22 bp, synthetic construct
  misc_feature 1..22: note = chemically synthesized
  source 1..22: mol_type = other DNA
ccaaattcaaatagaacggttg

SEQ ID NO: 53772 - DNA, 22 bp, synthetic construct
  misc_feature 1..22: note = chemically synthesized
  source 1..22: mol_type = other DNA
aaatagaacggttgcaaaattg

SEQ ID NO: 53773 - DNA, 22 bp, synthetic construct
  misc_feature 1..22: note = chemically synthesized
  source 1..22: mol_type = other DNA
caaaattgccagaggaaatgct

SEQ ID NO: 53774 - DNA, 22 bp, synthetic construct
  misc_feature 1..22: note = chemically synthesized
  source 1..22: mol_type = other DNA
ccagaggaaatgctgtttttcc

SEQ ID NO: 53775 - DNA, 22 bp, synthetic construct
  misc_feature 1..22: note = chemically synthesized
  source 1..22: mol_type = other DNA
tttttccagatggacacaccca

SEQ ID NO: 53776 - DNA, 22 bp, synthetic construct
  misc_feature 1..22: note = chemically synthesized
  source 1..22: mol_type = other DNA
ttccagatggacacacccaggg

SEQ ID NO: 53777 - DNA, 22 bp, synthetic construct
  misc_feature 1..22: note = chemically synthesized
  source 1..22: mol_type = other DNA
tccagatggacacacccaggga

SEQ ID NO: 53778 - DNA, 22 bp, synthetic construct
  misc_feature 1..22: note = chemically synthesized
  source 1..22: mol_type = other DNA
ccagatggacacacccagggat

SEQ ID NO: 53779 - DNA, 22 bp, synthetic construct
  misc_feature 1..22: note = chemically synthesized
  source 1..22: mol_type = other DNA
cagatggacacacccagggatg

SEQ ID NO: 53780 - DNA, 22 bp, synthetic construct
  misc_feature 1..22: note = chemically synthesized
  source 1..22: mol_type = other DNA
cagtgttctcacaaataatcca

SEQ ID NO: 53781 - DNA, 22 bp, synthetic construct
  misc_feature 1..22: note = chemically synthesized
  source 1..22: mol_type = other DNA
agtgttctcacaaataatccag

SEQ ID NO: 53782 - DNA, 22 bp, synthetic construct
  misc_feature 1..22: note = chemically synthesized
  source 1..22: mol_type = other DNA
tcacaaataatccagttttcta

SEQ ID NO: 53783 - DNA, 22 bp, synthetic construct
  misc_feature 1..22: note = chemically synthesized
  source 1..22: mol_type = other DNA
acaaataatccagttttctaat

SEQ ID NO: 53784 - DNA, 22 bp, synthetic construct
  misc_feature 1..22: note = chemically synthesized
  source 1..22: mol_type = other DNA
tctaattttgcaagcccagctt

SEQ ID NO: 53785 - DNA, 22 bp, synthetic construct
  misc_feature 1..22: note = chemically synthesized
  source 1..22: mol_type = other DNA
ctaattttgcaagcccagcttt

SEQ ID NO: 53786 - DNA, 22 bp, synthetic construct
  misc_feature 1..22: note = chemically synthesized
  source 1..22: mol_type = other DNA
taattttgcaagcccagctttc

SEQ ID NO: 53787 - DNA, 22 bp, synthetic construct
  misc_feature 1..22: note = chemically synthesized
  source 1..22: mol_type = other DNA
attttgcaagcccagctttcat

SEQ ID NO: 53788 - DNA, 22 bp, synthetic construct
  misc_feature 1..22: note = chemically synthesized
  source 1..22: mol_type = other DNA
tgcaagcccagctttcattaga

SEQ ID NO: 53789 - DNA, 22 bp, synthetic construct
  misc_feature 1..22: note = chemically synthesized
  source 1..22: mol_type = other DNA
gcaagcccagctttcattagaa

SEQ ID NO: 53790 - DNA, 22 bp, synthetic construct
  misc_feature 1..22: note = chemically synthesized
  source 1..22: mol_type = other DNA
caagcccagctttcattagaat

SEQ ID NO: 53791 - DNA, 22 bp, synthetic construct
  misc_feature 1..22: note = chemically synthesized
  source 1..22: mol_type = other DNA
tcattagaattttgcaaaaatc

SEQ ID NO: 53792 - DNA, 22 bp, synthetic construct
  misc_feature 1..22: note = chemically synthesized
  source 1..22: mol_type = other DNA
cattagaattttgcaaaaatcc

SEQ ID NO: 53793 - DNA, 22 bp, synthetic construct
  misc_feature 1..22: note = chemically synthesized
  source 1..22: mol_type = other DNA
attagaattttgcaaaaatcct

SEQ ID NO: 53794 - DNA, 22 bp, synthetic construct
  misc_feature 1..22: note = chemically synthesized
  source 1..22: mol_type = other DNA
gaattttgcaaaaatccttgct

SEQ ID NO: 53795 - DNA, 22 bp, synthetic construct
  misc_feature 1..22: note = chemically synthesized
  source 1..22: mol_type = other DNA
tgcaaaaatccttgctttgcga

SEQ ID NO: 53796 - DNA, 22 bp, synthetic construct
  misc_feature 1..22: note = chemically synthesized
  source 1..22: mol_type = other DNA
gcaaaaatccttgctttgcgag

SEQ ID NO: 53797 - DNA, 22 bp, synthetic construct
  misc_feature 1..22: note = chemically synthesized
  source 1..22: mol_type = other DNA
caaaaatccttgctttgcgagc

SEQ ID NO: 53798 - DNA, 22 bp, synthetic construct
  misc_feature 1..22: note = chemically synthesized
  source 1..22: mol_type = other DNA
gctttgcgagcatggcacaggc

SEQ ID NO: 53799 - DNA, 22 bp, synthetic construct
  misc_feature 1..22: note = chemically synthesized
  source 1..22: mol_type = other DNA
ctttgcgagcatggcacaggca

SEQ ID NO: 53800 - DNA, 22 bp, synthetic construct
  misc_feature 1..22: note = chemically synthesized
  source 1..22: mol_type = other DNA
tgcgagcatggcacaggcaaga

SEQ ID NO: 53801 - DNA, 22 bp, synthetic construct
  misc_feature 1..22: note = chemically synthesized
  source 1..22: mol_type = other DNA
gcgagcatggcacaggcaagag

SEQ ID NO: 53802 - DNA, 22 bp, synthetic construct
  misc_feature 1..22: note = chemically synthesized
  source 1..22: mol_type = other DNA
cgagcatggcacaggcaagaga

SEQ ID NO: 53803 - DNA, 22 bp, synthetic construct
  misc_feature 1..22: note = chemically synthesized
  source 1..22: mol_type = other DNA
tctctttcttcccccagagcct

SEQ ID NO: 53804 - DNA, 22 bp, synthetic construct
  misc_feature 1..22: note = chemically synthesized
  source 1..22: mol_type = other DNA
tctttcttcccccagagccttt

SEQ ID NO: 53805 - DNA, 22 bp, synthetic construct
  misc_feature 1..22: note = chemically synthesized
  source 1..22: mol_type = other DNA
tttcttcccccagagcctttga

SEQ ID NO: 53806 - DNA, 22 bp, synthetic construct
  misc_feature 1..22: note = chemically synthesized
  source 1..22: mol_type = other DNA
tcttcccccagagcctttgact

SEQ ID NO: 53807 - DNA, 22 bp, synthetic construct
  misc_feature 1..22: note = chemically synthesized
  source 1..22: mol_type = other DNA
cttcccccagagcctttgactg

SEQ ID NO: 53808 - DNA, 22 bp, synthetic construct
  misc_feature 1..22: note = chemically synthesized
  source 1..22: mol_type = other DNA
ttcccccagagcctttgactgc

SEQ ID NO: 53809 - DNA, 22 bp, synthetic construct
  misc_feature 1..22: note = chemically synthesized
  source 1..22: mol_type = other DNA
cccccagagcctttgactgcac

SEQ ID NO: 53810 - DNA, 22 bp, synthetic construct
  misc_feature 1..22: note = chemically synthesized
  source 1..22: mol_type = other DNA
ccccagagcctttgactgcact

SEQ ID NO: 53811 - DNA, 22 bp, synthetic construct
  misc_feature 1..22: note = chemically synthesized
  source 1..22: mol_type = other DNA
tgactgcacttagatcattgac

SEQ ID NO: 53812 - DNA, 22 bp, synthetic construct
  misc_feature 1..22: note = chemically synthesized
  source 1..22: mol_type = other DNA
gactgcacttagatcattgact

SEQ ID NO: 53813 - DNA, 22 bp, synthetic construct
  misc_feature 1..22: note = chemically synthesized
  source 1..22: mol_type = other DNA
actgcacttagatcattgactt

SEQ ID NO: 53814 - DNA, 22 bp, synthetic construct
  misc_feature 1..22: note = chemically synthesized
  source 1..22: mol_type = other DNA
cacttagatcattgactttggt

SEQ ID NO: 53815 - DNA, 22 bp, synthetic construct
  misc_feature 1..22: note = chemically synthesized
  source 1..22: mol_type = other DNA
agatcattgactttggttcaga

SEQ ID NO: 53816 - DNA, 22 bp, synthetic construct
  misc_feature 1..22: note = chemically synthesized
  source 1..22: mol_type = other DNA
gatcattgactttggttcagaa

SEQ ID NO: 53817 - DNA, 22 bp, synthetic construct
  misc_feature 1..22: note = chemically synthesized
  source 1..22: mol_type = other DNA
actttggttcagaaacctgact

SEQ ID NO: 53818 - DNA, 22 bp, synthetic construct
  misc_feature 1..22: note = chemically synthesized
  source 1..22: mol_type = other DNA
tggttcagaaacctgactgcat

SEQ ID NO: 53819 - DNA, 22 bp, synthetic construct
  misc_feature 1..22: note = chemically synthesized
  source 1..22: mol_type = other DNA
ggttcagaaacctgactgcatc

SEQ ID NO: 53820 - DNA, 22 bp, synthetic construct
  misc_feature 1..22: note = chemically synthesized
  source 1..22: mol_type = other DNA
gttcagaaacctgactgcatct

SEQ ID NO: 53821 - DNA, 22 bp, synthetic construct
  misc_feature 1..22: note = chemically synthesized
  source 1..22: mol_type = other DNA
agaaacctgactgcatctggag

SEQ ID NO: 53822 - DNA, 22 bp, synthetic construct
  misc_feature 1..22: note = chemically synthesized
  source 1..22: mol_type = other DNA
actgcatctggagttgacatga

SEQ ID NO: 53823 - DNA, 22 bp, synthetic construct
  misc_feature 1..22: note = chemically synthesized
  source 1..22: mol_type = other DNA
catctggagttgacatgagcag

SEQ ID NO: 53824 - DNA, 22 bp, synthetic construct
  misc_feature 1..22: note = chemically synthesized
  source 1..22: mol_type = other DNA
gagttgacatgagcagcatgga

SEQ ID NO: 53825 - DNA, 22 bp, synthetic construct
  misc_feature 1..22: note = chemically synthesized
  source 1..22: mol_type = other DNA
acatgagcagcatggaagatgt

SEQ ID NO: 53826 - DNA, 22 bp, synthetic construct
  misc_feature 1..22: note = chemically synthesized
  source 1..22: mol_type = other DNA
gtcccagcacctcactccagag

SEQ ID NO: 53827 - DNA, 22 bp, synthetic construct
  misc_feature 1..22: note = chemically synthesized
  source 1..22: mol_type = other DNA
tcccagcacctcactccagagg

SEQ ID NO: 53828 - DNA, 22 bp, synthetic construct
  misc_feature 1..22: note = chemically synthesized
  source 1..22: mol_type = other DNA
actccagaggccagctcagctc

SEQ ID NO: 53829 - DNA, 22 bp, synthetic construct
  misc_feature 1..22: note = chemically synthesized
  source 1..22: mol_type = other DNA
cagaggccagctcagctcaatc

SEQ ID NO: 53830 - DNA, 22 bp, synthetic construct
  misc_feature 1..22: note = chemically synthesized
  source 1..22: mol_type = other DNA
agctcaatctgggcagagctgc

SEQ ID NO: 53831 - DNA, 22 bp, synthetic construct
  misc_feature 1..22: note = chemically synthesized
  source 1..22: mol_type = other DNA
aatctgggcagagctgcatgat

SEQ ID NO: 53832 - DNA, 22 bp, synthetic construct
  misc_feature 1..22: note = chemically synthesized
  source 1..22: mol_type = other DNA
ggcagagctgcatgatggaagt

SEQ ID NO: 53833 - DNA, 22 bp, synthetic construct
  misc_feature 1..22: note = chemically synthesized
  source 1..22: mol_type = other DNA
catgatggaagtttctgactac

SEQ ID NO: 53834 - DNA, 22 bp, synthetic construct
  misc_feature 1..22: note = chemically synthesized
  source 1..22: mol_type = other DNA
ctgactaccaagcatcgggcag

SEQ ID NO: 53835 - DNA, 22 bp, synthetic construct
  misc_feature 1..22: note = chemically synthesized
  source 1..22: mol_type = other DNA
tgactaccaagcatcgggcaga

SEQ ID NO: 53836 - DNA, 22 bp, synthetic construct
  misc_feature 1..22: note = chemically synthesized
  source 1..22: mol_type = other DNA
actaccaagcatcgggcagagg

SEQ ID NO: 53837 - DNA, 22 bp, synthetic construct
  misc_feature 1..22: note = chemically synthesized
  source 1..22: mol_type = other DNA
ccaagcatcgggcagagggtgc

SEQ ID NO: 53838 - DNA, 22 bp, synthetic construct
  misc_feature 1..22: note = chemically synthesized
  source 1..22: mol_type = other DNA
gactacatagttgtgtgaggga

SEQ ID NO: 53839 - DNA, 22 bp, synthetic construct
  misc_feature 1..22: note = chemically synthesized
  source 1..22: mol_type = other DNA
catagttgtgtgagggagcacc

SEQ ID NO: 53840 - DNA, 22 bp, synthetic construct
  misc_feature 1..22: note = chemically synthesized
  source 1..22: mol_type = other DNA
tgtgagggagcaccgttctcta

SEQ ID NO: 53841 - DNA, 22 bp, synthetic construct
  misc_feature 1..22: note = chemically synthesized
  source 1..22: mol_type = other DNA
tctagaatctgctatttgagca

SEQ ID NO: 53842 - DNA, 22 bp, synthetic construct
  misc_feature 1..22: note = chemically synthesized
  source 1..22: mol_type = other DNA
tagaatctgctatttgagcaag

SEQ ID NO: 53843 - DNA, 22 bp, synthetic construct
  misc_feature 1..22: note = chemically synthesized
  source 1..22: mol_type = other DNA
gaatctgctatttgagcaaggc

SEQ ID NO: 53844 - DNA, 22 bp, synthetic construct
  misc_feature 1..22: note = chemically synthesized
  source 1..22: mol_type = other DNA
ctatttgagcaaggcaaacatc

SEQ ID NO: 53845 - DNA, 22 bp, synthetic construct
  misc_feature 1..22: note = chemically synthesized
  source 1..22: mol_type = other DNA
tttgagcaaggcaaacatcctg

SEQ ID NO: 53846 - DNA, 22 bp, synthetic construct
  misc_feature 1..22: note = chemically synthesized
  source 1..22: mol_type = other DNA
gagcaaggcaaacatcctgata

SEQ ID NO: 53847 - DNA, 22 bp, synthetic construct
  misc_feature 1..22: note = chemically synthesized
  source 1..22: mol_type = other DNA
agcaaggcaaacatcctgataa

SEQ ID NO: 53848 - DNA, 22 bp, synthetic construct
  misc_feature 1..22: note = chemically synthesized
  source 1..22: mol_type = other DNA
ataatggtgaaaacctaccgca

SEQ ID NO: 53849 - DNA, 22 bp, synthetic construct
  misc_feature 1..22: note = chemically synthesized
  source 1..22: mol_type = other DNA
ccgcaagttgccaggaaagttg

SEQ ID NO: 53850 - DNA, 22 bp, synthetic construct
  misc_feature 1..22: note = chemically synthesized
  source 1..22: mol_type = other DNA
ccaggaaagttgatgtggtctg

SEQ ID NO: 53851 - DNA, 22 bp, synthetic construct
  misc_feature 1..22: note = chemically synthesized
  source 1..22: mol_type = other DNA
atgtggtctgcgagtaggtgct

SEQ ID NO: 53852 - DNA, 22 bp, synthetic construct
  misc_feature 1..22: note = chemically synthesized
  source 1..22: mol_type = other DNA
cgagtaggtgctgccatccagt

SEQ ID NO: 53853 - DNA, 22 bp, synthetic construct
  misc_feature 1..22: note = chemically synthesized
  source 1..22: mol_type = other DNA
ccatccagtggccgacatagag

SEQ ID NO: 53854 - DNA, 22 bp, synthetic construct
  misc_feature 1..22: note = chemically synthesized
  source 1..22: mol_type = other DNA
tgagggcaggtaggccacaggt

SEQ ID NO: 53855 - DNA, 22 bp, synthetic construct
  misc_feature 1..22: note = chemically synthesized
  source 1..22: mol_type = other DNA
agggcaggtaggccacaggtga

SEQ ID NO: 53856 - DNA, 22 bp, synthetic construct
  misc_feature 1..22: note = chemically synthesized
  source 1..22: mol_type = other DNA
aagccctccctgatggggcctt

SEQ ID NO: 53857 - DNA, 22 bp, synthetic construct
  misc_feature 1..22: note = chemically synthesized
  source 1..22: mol_type = other DNA
cctgatggggccttggggagag

SEQ ID NO: 53858 - DNA, 22 bp, synthetic construct
  misc_feature 1..22: note = chemically synthesized
  source 1..22: mol_type = other DNA
atggggccttggggagagggca

SEQ ID NO: 53859 - DNA, 22 bp, synthetic construct
  misc_feature 1..22: note = chemically synthesized
  source 1..22: mol_type = other DNA
ggggagagggcagcagggtaag

SEQ ID NO: 53860 - DNA, 22 bp, synthetic construct
  misc_feature 1..22: note = chemically synthesized
  source 1..22: mol_type = other DNA
gggagagggcagcagggtaagt

SEQ ID NO: 53861 - DNA, 22 bp, synthetic construct
  misc_feature 1..22: note = chemically synthesized
  source 1..22: mol_type = other DNA
attgtggatgacgactgacctg

SEQ ID NO: 53862 - DNA, 22 bp, synthetic construct
  misc_feature 1..22: note = chemically synthesized
  source 1..22: mol_type = other DNA
tggatgacgactgacctggaaa

SEQ ID NO: 53863 - DNA, 22 bp, synthetic construct
  misc_feature 1..22: note = chemically synthesized
  source 1..22: mol_type = other DNA
acctggaaaatccccttggcct

SEQ ID NO: 53864 - DNA, 22 bp, synthetic construct
  misc_feature 1..22: note = chemically synthesized
  source 1..22: mol_type = other DNA
gaaaatccccttggcctcaaca

SEQ ID NO: 53865 - DNA, 22 bp, synthetic construct
  misc_feature 1..22: note = chemically synthesized
  source 1..22: mol_type = other DNA
ggcctcaacacctccaaactct

SEQ ID NO: 53866 - DNA, 22 bp, synthetic construct
  misc_feature 1..22: note = chemically synthesized
  source 1..22: mol_type = other DNA
gcctcaacacctccaaactctg

SEQ ID NO: 53867 - DNA, 22 bp, synthetic construct
  misc_feature 1..22: note = chemically synthesized
  source 1..22: mol_type = other DNA
aacacctccaaactctgcattt

SEQ ID NO: 53868 - DNA, 22 bp, synthetic construct
  misc_feature 1..22: note = chemically synthesized
  source 1..22: mol_type = other DNA
caaactctgcatttgatccaag

SEQ ID NO: 53869 - DNA, 22 bp, synthetic construct
  misc_feature 1..22: note = chemically synthesized
  source 1..22: mol_type = other DNA
tgcatttgatccaagtcaggga

SEQ ID NO: 53870 - DNA, 22 bp, synthetic construct
  misc_feature 1..22: note = chemically synthesized
  source 1..22: mol_type = other DNA
catttgatccaagtcagggaac

SEQ ID NO: 53871 - DNA, 22 bp, synthetic construct
  misc_feature 1..22: note = chemically synthesized
  source 1..22: mol_type = other DNA
gatccaagtcagggaacacctg

SEQ ID NO: 53872 - DNA, 22 bp, synthetic construct
  misc_feature 1..22: note = chemically synthesized
  source 1..22: mol_type = other DNA
atccaagtcagggaacacctgg

SEQ ID NO: 53873 - DNA, 22 bp, synthetic construct
  misc_feature 1..22: note = chemically synthesized
  source 1..22: mol_type = other DNA
gaaacatgaaggggagagcagg

SEQ ID NO: 53874 - DNA, 22 bp, synthetic construct
  misc_feature 1..22: note = chemically synthesized
  source 1..22: mol_type = other DNA
tgacctccctctcagaggctga

SEQ ID NO: 53875 - DNA, 22 bp, synthetic construct
  misc_feature 1..22: note = chemically synthesized
  source 1..22: mol_type = other DNA
gacctccctctcagaggctgag

SEQ ID NO: 53876 - DNA, 22 bp, synthetic construct
  misc_feature 1..22: note = chemically synthesized
  source 1..22: mol_type = other DNA
acctccctctcagaggctgaga

SEQ ID NO: 53877 - DNA, 22 bp, synthetic construct
  misc_feature 1..22: note = chemically synthesized
  source 1..22: mol_type = other DNA
cctctcagaggctgagaacgcc

SEQ ID NO: 53878 - DNA, 22 bp, synthetic construct
  misc_feature 1..22: note = chemically synthesized
  source 1..22: mol_type = other DNA
tcagaggctgagaacgccaatt

SEQ ID NO: 53879 - DNA, 22 bp, synthetic construct
  misc_feature 1..22: note = chemically synthesized
  source 1..22: mol_type = other DNA
agaggctgagaacgccaattga

SEQ ID NO: 53880 - DNA, 22 bp, synthetic construct
  misc_feature 1..22: note = chemically synthesized
  source 1..22: mol_type = other DNA
agaacgccaattgacctgatgt

SEQ ID NO: 53881 - DNA, 22 bp, synthetic construct
  misc_feature 1..22: note = chemically synthesized
  source 1..22: mol_type = other DNA
acctgatgtcattattgacatg

SEQ ID NO: 53882 - DNA, 22 bp, synthetic construct
  misc_feature 1..22: note = chemically synthesized
  source 1..22: mol_type = other DNA
atgtcattattgacatgtagaa

SEQ ID NO: 53883 - DNA, 22 bp, synthetic construct
  misc_feature 1..22: note = chemically synthesized
  source 1..22: mol_type = other DNA
ttgacatgtagaaaattgatga

SEQ ID NO: 53884 - DNA, 22 bp, synthetic construct
  misc_feature 1..22: note = chemically synthesized
  source 1..22: mol_type = other DNA
acatgtagaaaattgatgaaca

SEQ ID NO: 53885 - DNA, 22 bp, synthetic construct
  misc_feature 1..22: note = chemically synthesized
  source 1..22: mol_type = other DNA
atgaacaggcctgagttatgtt

SEQ ID NO: 53886 - DNA, 22 bp, synthetic construct
  misc_feature 1..22: note = chemically synthesized
  source 1..22: mol_type = other DNA
agttatgttttgtggcacctca

SEQ ID NO: 53887 - DNA, 22 bp, synthetic construct
  misc_feature 1..22: note = chemically synthesized
  source 1..22: mol_type = other DNA
tgttttgtggcacctcatggtc

SEQ ID NO: 53888 - DNA, 22 bp, synthetic construct
  misc_feature 1..22: note = chemically synthesized
  source 1..22: mol_type = other DNA
tgtggcacctcatggtctagtt

SEQ ID NO: 53889 - DNA, 22 bp, synthetic construct
  misc_feature 1..22: note = chemically synthesized
  source 1..22: mol_type = other DNA
gtggcacctcatggtctagtta

SEQ ID NO: 53890 - DNA, 22 bp, synthetic construct
  misc_feature 1..22: note = chemically synthesized
  source 1..22: mol_type = other DNA
tggcacctcatggtctagttag

SEQ ID NO: 53891 - DNA, 22 bp, synthetic construct
  misc_feature 1..22: note = chemically synthesized
  source 1..22: mol_type = other DNA
atggtctagttagtgttctgag

SEQ ID NO: 53892 - DNA, 22 bp, synthetic construct
  misc_feature 1..22: note = chemically synthesized
  source 1..22: mol_type = other DNA
gttagtgttctgagaatcattt

SEQ ID NO: 53893 - DNA, 22 bp, synthetic construct
  misc_feature 1..22: note = chemically synthesized
  source 1..22: mol_type = other DNA
gtgttctgagaatcattttctc

SEQ ID NO: 53894 - DNA, 22 bp, synthetic construct
  misc_feature 1..22: note = chemically synthesized
  source 1..22: mol_type = other DNA
tgagaatcattttctcagtgga

SEQ ID NO: 53895 - DNA, 22 bp, synthetic construct
  misc_feature 1..22: note = chemically synthesized
  source 1..22: mol_type = other DNA
agaatcattttctcagtggacc

SEQ ID NO: 53896 - DNA, 22 bp, synthetic construct
  misc_feature 1..22: note = chemically synthesized
  source 1..22: mol_type = other DNA
tctcagtggacctgcaggtgag

SEQ ID NO: 53897 - DNA, 22 bp, synthetic construct
  misc_feature 1..22: note = chemically synthesized
  source 1..22: mol_type = other DNA
ctcagtggacctgcaggtgaga

SEQ ID NO: 53898 - DNA, 22 bp, synthetic construct
  misc_feature 1..22: note = chemically synthesized
  source 1..22: mol_type = other DNA
tcagtggacctgcaggtgagac

SEQ ID NO: 53899 - DNA, 22 bp, synthetic construct
  misc_feature 1..22: note = chemically synthesized
  source 1..22: mol_type = other DNA
agtggacctgcaggtgagacca

SEQ ID NO: 53900 - DNA, 22 bp, synthetic construct
  misc_feature 1..22: note = chemically synthesized
  source 1..22: mol_type = other DNA
caggtgagaccaggcgaggcag

SEQ ID NO: 53901 - DNA, 22 bp, synthetic construct
  misc_feature 1..22: note = chemically synthesized
  source 1..22: mol_type = other DNA
gtgggggatggtggttagaaat

SEQ ID NO: 53902 - DNA, 22 bp, synthetic construct
  misc_feature 1..22: note = chemically synthesized
  source 1..22: mol_type = other DNA
gaaatgtgtggatggttgtggg

SEQ ID NO: 53903 - DNA, 22 bp, synthetic construct
  misc_feature 1..22: note = chemically synthesized
  source 1..22: mol_type = other DNA
tggggcagaagaaacagcaagt

SEQ ID NO: 53904 - DNA, 22 bp, synthetic construct
  misc_feature 1..22: note = chemically synthesized
  source 1..22: mol_type = other DNA
tgggccagctacaaactggtta

SEQ ID NO: 53905 - DNA, 22 bp, synthetic construct
  misc_feature 1..22: note = chemically synthesized
  source 1..22: mol_type = other DNA
ggccagctacaaactggttata

SEQ ID NO: 53906 - DNA, 22 bp, synthetic construct
  misc_feature 1..22: note = chemically synthesized
  source 1..22: mol_type = other DNA
caaactggttatatgatgtcta

SEQ ID NO: 53907 - DNA, 22 bp, synthetic construct
  misc_feature 1..22: note = chemically synthesized
  source 1..22: mol_type = other DNA
gttatatgatgtctactgatga

SEQ ID NO: 53908 - DNA, 22 bp, synthetic construct
  misc_feature 1..22: note = chemically synthesized
  source 1..22: mol_type = other DNA
tatgatgtctactgatgatgat

SEQ ID NO: 53909 - DNA, 22 bp, synthetic construct
  misc_feature 1..22: note = chemically synthesized
  source 1..22: mol_type = other DNA
ctgatgatgatagtgatggtgg

SEQ ID NO: 53910 - DNA, 22 bp, synthetic construct
  misc_feature 1..22: note = chemically synthesized
  source 1..22: mol_type = other DNA
atgatgatagtgatggtggtgg

SEQ ID NO: 53911 - DNA, 22 bp, synthetic construct
  misc_feature 1..22: note = chemically synthesized
  source 1..22: mol_type = other DNA
tgatggtggtggaatgatgatg

SEQ ID NO: 53912 - DNA, 22 bp, synthetic construct
  misc_feature 1..22: note = chemically synthesized
  source 1..22: mol_type = other DNA
gtgatggtggtagtggtcgtgg

SEQ ID NO: 53913 - DNA, 22 bp, synthetic construct
  misc_feature 1..22: note = chemically synthesized
  source 1..22: mol_type = other DNA
atggtggtggtaatgataatga

SEQ ID NO: 53914 - DNA, 22 bp, synthetic construct
  misc_feature 1..22: note = chemically synthesized
  source 1..22: mol_type = other DNA
tcatgatgatagcggtggtgat

SEQ ID NO: 53915 - DNA, 22 bp, synthetic construct
  misc_feature 1..22: note = chemically synthesized
  source 1..22: mol_type = other DNA
agggtgatgataatagtgacag

SEQ ID NO: 53916 - DNA, 22 bp, synthetic construct
  misc_feature 1..22: note = chemically synthesized
  source 1..22: mol_type = other DNA
agtagtaatgatggtgatggtg

SEQ ID NO: 53917 - DNA, 22 bp, synthetic construct
  misc_feature 1..22: note = chemically synthesized
  source 1..22: mol_type = other DNA
tggtgatgatggtggtggtagt

SEQ ID NO: 53918 - DNA, 22 bp, synthetic construct
  misc_feature 1..22: note = chemically synthesized
  source 1..22: mol_type = other DNA
agggtgatgataatagtgatag

SEQ ID NO: 53919 - DNA, 22 bp, synthetic construct
  misc_feature 1..22: note = chemically synthesized
  source 1..22: mol_type = other DNA
tcactattatcatcaccctcaa

SEQ ID NO: 53920 - DNA, 22 bp, synthetic construct
  misc_feature 1..22: note = chemically synthesized
  source 1..22: mol_type = other DNA
ttatcatcaccctcaacatcat

SEQ ID NO: 53921 - DNA, 22 bp, synthetic construct
  misc_feature 1..22: note = chemically synthesized
  source 1..22: mol_type = other DNA
tcatcaccctcaacatcatcac

SEQ ID NO: 53922 - DNA, 22 bp, synthetic construct
  misc_feature 1..22: note = chemically synthesized
  source 1..22: mol_type = other DNA
aacatcatcaccatcatcacta

SEQ ID NO: 53923 - DNA, 22 bp, synthetic construct
  misc_feature 1..22: note = chemically synthesized
  source 1..22: mol_type = other DNA
tcatcaccaccaccatcatcgt

SEQ ID NO: 53924 - DNA, 22 bp, synthetic construct
  misc_feature 1..22: note = chemically synthesized
  source 1..22: mol_type = other DNA
ctaccactaccaccaccatcat

SEQ ID NO: 53925 - DNA, 22 bp, synthetic construct
  misc_feature 1..22: note = chemically synthesized
  source 1..22: mol_type = other DNA
ccactaccaccaccatcatcac

SEQ ID NO: 53926 - DNA, 22 bp, synthetic construct
  misc_feature 1..22: note = chemically synthesized
  source 1..22: mol_type = other DNA
ccaccaccatcatcaccacagc

SEQ ID NO: 53927 - DNA, 22 bp, synthetic construct
  misc_feature 1..22: note = chemically synthesized
  source 1..22: mol_type = other DNA
ctactcagcaccaccatcatca

SEQ ID NO: 53928 - DNA, 22 bp, synthetic construct
  misc_feature 1..22: note = chemically synthesized
  source 1..22: mol_type = other DNA
ctcagcaccaccatcatcattc

SEQ ID NO: 53929 - DNA, 22 bp, synthetic construct
  misc_feature 1..22: note = chemically synthesized
  source 1..22: mol_type = other DNA
agcaccaccatcatcattccac

SEQ ID NO: 53930 - DNA, 22 bp, synthetic construct
  misc_feature 1..22: note = chemically synthesized
  source 1..22: mol_type = other DNA
caccaccatcaccatcattcca

SEQ ID NO: 53931 - DNA, 22 bp, synthetic construct
  misc_feature 1..22: note = chemically synthesized
  source 1..22: mol_type = other DNA
caccatcaccattatcattacc

SEQ ID NO: 53932 - DNA, 22 bp, synthetic construct
  misc_feature 1..22: note = chemically synthesized
  source 1..22: mol_type = other DNA
tcattaccaccaccactgtcac

SEQ ID NO: 53933 - DNA, 22 bp, synthetic construct
  misc_feature 1..22: note = chemically synthesized
  source 1..22: mol_type = other DNA
ccaccaccactgtcactattat

SEQ ID NO: 53934 - DNA, 22 bp, synthetic construct
  misc_feature 1..22: note = chemically synthesized
  source 1..22: mol_type = other DNA
tcactattatcatcaccctcaa

SEQ ID NO: 53935 - DNA, 22 bp, synthetic construct
  misc_feature 1..22: note = chemically synthesized
  source 1..22: mol_type = other DNA
ttatcatcaccctcaacatcat

SEQ ID NO: 53936 - DNA, 22 bp, synthetic construct
  misc_feature 1..22: note = chemically synthesized
  source 1..22: mol_type = other DNA
tcatcaccctcaacatcatcac

SEQ ID NO: 53937 - DNA, 22 bp, synthetic construct
  misc_feature 1..22: note = chemically synthesized
  source 1..22: mol_type = other DNA
aacatcatcaccaccaccatca

SEQ ID NO: 53938 - DNA, 22 bp, synthetic construct
  misc_feature 1..22: note = chemically synthesized
  source 1..22: mol_type = other DNA
ctaccaccaccaccaccatcac

SEQ ID NO: 53939 - DNA, 22 bp, synthetic construct
  misc_feature 1..22: note = chemically synthesized
  source 1..22: mol_type = other DNA
ccaccaccaccaccatcaccat

SEQ ID NO: 53940 - DNA, 22 bp, synthetic construct
  misc_feature 1..22: note = chemically synthesized
  source 1..22: mol_type = other DNA
taccaccatcaccattatcatc

SEQ ID NO: 53941 - DNA, 22 bp, synthetic construct
  misc_feature 1..22: note = chemically synthesized
  source 1..22: mol_type = other DNA
ccaccatcaccattatcatcac

SEQ ID NO: 53942 - DNA, 22 bp, synthetic construct
  misc_feature 1..22: note = chemically synthesized
  source 1..22: mol_type = other DNA
tcatcaccatcaccatcaccac

SEQ ID NO: 53943 - DNA, 22 bp, synthetic construct
  misc_feature 1..22: note = chemically synthesized
  source 1..22: mol_type = other DNA
tcatcatgataatcattatcat

SEQ ID NO: 53944 - DNA, 22 bp, synthetic construct
  misc_feature 1..22: note = chemically synthesized
  source 1..22: mol_type = other DNA
tcattaccaccaccattagcat

SEQ ID NO: 53945 - DNA, 22 bp, synthetic construct
  misc_feature 1..22: note = chemically synthesized
  source 1..22: mol_type = other DNA
ccaccaccattagcattatcat

SEQ ID NO: 53946 - DNA, 22 bp, synthetic construct
  misc_feature 1..22: note = chemically synthesized
  source 1..22: mol_type = other DNA
gcattatcattaccaccaccat

SEQ ID NO: 53947 - DNA, 22 bp, synthetic construct
  misc_feature 1..22: note = chemically synthesized
  source 1..22: mol_type = other DNA
tcattaccaccaccatcactat

SEQ ID NO: 53948 - DNA, 22 bp, synthetic construct
  misc_feature 1..22: note = chemically synthesized
  source 1..22: mol_type = other DNA
ccaccaccatcactatcactat

SEQ ID NO: 53949 - DNA, 22 bp, synthetic construct
  misc_feature 1..22: note = chemically synthesized
  source 1..22: mol_type = other DNA
tcactatcaccatcaccacgac

SEQ ID NO: 53950 - DNA, 22 bp, synthetic construct
  misc_feature 1..22: note = chemically synthesized
  source 1..22: mol_type = other DNA
tcaccatcaccacgaccactac

SEQ ID NO: 53951 - DNA, 22 bp, synthetic construct
  misc_feature 1..22: note = chemically synthesized
  source 1..22: mol_type = other DNA
ccaccatcaccaacaccatcat

SEQ ID NO: 53952 - DNA, 22 bp, synthetic construct
  misc_feature 1..22: note = chemically synthesized
  source 1..22: mol_type = other DNA
ctacccaccaccaccatcatca

SEQ ID NO: 53953 - DNA, 22 bp, synthetic construct
  misc_feature 1..22: note = chemically synthesized
  source 1..22: mol_type = other DNA
cccaccaccaccatcatcatca

SEQ ID NO: 53954 - DNA, 22 bp, synthetic construct
  misc_feature 1..22: note = chemically synthesized
  source 1..22: mol_type = other DNA
caccaccatcacaattattacc

SEQ ID NO: 53955 - DNA, 22 bp, synthetic construct
  misc_feature 1..22: note = chemically synthesized
  source 1..22: mol_type = other DNA
ttaccaccaccaccatcaccac

SEQ ID NO: 53956 - DNA, 22 bp, synthetic construct
  misc_feature 1..22: note = chemically synthesized
  source 1..22: mol_type = other DNA
ccaccaccaccatcaccaccac

SEQ ID NO: 53957 - DNA, 22 bp, synthetic construct
  misc_feature 1..22: note = chemically synthesized
  source 1..22: mol_type = other DNA
tcatcatcagtagacatcatat

SEQ ID NO: 53958 - DNA, 22 bp, synthetic construct
  misc_feature 1..22: note = chemically synthesized
  source 1..22: mol_type = other DNA
gtagctggcccagagcctactt

SEQ ID NO: 53959 - DNA, 22 bp, synthetic construct
  misc_feature 1..22: note = chemically synthesized
  source 1..22: mol_type = other DNA
tagctggcccagagcctacttg

SEQ ID NO: 53960 - DNA, 22 bp, synthetic construct
  misc_feature 1..22: note = chemically synthesized
  source 1..22: mol_type = other DNA
gcccagagcctacttgctgttt

SEQ ID NO: 53961 - DNA, 22 bp, synthetic construct
  misc_feature 1..22: note = chemically synthesized
  source 1..22: mol_type = other DNA
cttgctgtttcttctgccccac

SEQ ID NO: 53962 - DNA, 22 bp, synthetic construct
  misc_feature 1..22: note = chemically synthesized
  source 1..22: mol_type = other DNA
gctgtttcttctgccccacaac

SEQ ID NO: 53963 - DNA, 22 bp, synthetic construct
  misc_feature 1..22: note = chemically synthesized
  source 1..22: mol_type = other DNA
ctgtttcttctgccccacaacc

SEQ ID NO: 53964 - DNA, 22 bp, synthetic construct
  misc_feature 1..22: note = chemically synthesized
  source 1..22: mol_type = other DNA
tttcttctgccccacaaccatc

SEQ ID NO: 53965 - DNA, 22 bp, synthetic construct
  misc_feature 1..22: note = chemically synthesized
  source 1..22: mol_type = other DNA
cttctgccccacaaccatccac

SEQ ID NO: 53966 - DNA, 22 bp, synthetic construct
  misc_feature 1..22: note = chemically synthesized
  source 1..22: mol_type = other DNA
ttctgccccacaaccatccaca

SEQ ID NO: 53967 - DNA, 22 bp, synthetic construct
  misc_feature 1..22: note = chemically synthesized
  source 1..22: mol_type = other DNA
ctgccccacaaccatccacaca

SEQ ID NO: 53968 - DNA, 22 bp, synthetic construct
  misc_feature 1..22: note = chemically synthesized
  source 1..22: mol_type = other DNA
tgccccacaaccatccacacat

SEQ ID NO: 53969 - DNA, 22 bp, synthetic construct
  misc_feature 1..22: note = chemically synthesized
  source 1..22: mol_type = other DNA
ccccacaaccatccacacattt

SEQ ID NO: 53970 - DNA, 22 bp, synthetic construct
  misc_feature 1..22: note = chemically synthesized
  source 1..22: mol_type = other DNA
ctaaccaccatcccccactagg

SEQ ID NO: 53971 - DNA, 22 bp, synthetic construct
  misc_feature 1..22: note = chemically synthesized
  source 1..22: mol_type = other DNA
taaccaccatcccccactaggc

SEQ ID NO: 53972 - DNA, 22 bp, synthetic construct
  misc_feature 1..22: note = chemically synthesized
  source 1..22: mol_type = other DNA
accaccatcccccactaggctt

SEQ ID NO: 53973 - DNA, 22 bp, synthetic construct
  misc_feature 1..22: note = chemically synthesized
  source 1..22: mol_type = other DNA
ggcttctgcctcgcctggtctc

SEQ ID NO: 53974 - DNA, 22 bp, synthetic construct
  misc_feature 1..22: note = chemically synthesized
  source 1..22: mol_type = other DNA
ctgcctcgcctggtctcacctg

SEQ ID NO: 53975 - DNA, 22 bp, synthetic construct
  misc_feature 1..22: note = chemically synthesized
  source 1..22: mol_type = other DNA
tgcctcgcctggtctcacctgc

SEQ ID NO: 53976 - DNA, 22 bp, synthetic construct
  misc_feature 1..22: note = chemically synthesized
  source 1..22: mol_type = other DNA
cctcgcctggtctcacctgcag

SEQ ID NO: 53977 - DNA, 22 bp, synthetic construct
  misc_feature 1..22: note = chemically synthesized
  source 1..22: mol_type = other DNA
gcctggtctcacctgcaggtcc

SEQ ID NO: 53978 - DNA, 22 bp, synthetic construct
  misc_feature 1..22: note = chemically synthesized
  source 1..22: mol_type = other DNA
gtctcacctgcaggtccactga

SEQ ID NO: 53979 - DNA, 22 bp, synthetic construct
  misc_feature 1..22: note = chemically synthesized
  source 1..22: mol_type = other DNA
acctgcaggtccactgagaaaa

SEQ ID NO: 53980 - DNA, 22 bp, synthetic construct
  misc_feature 1..22: note = chemically synthesized
  source 1..22: mol_type = other DNA
caggtccactgagaaaatgatt

SEQ ID NO: 53981 - DNA, 22 bp, synthetic construct
  misc_feature 1..22: note = chemically synthesized
  source 1..22: mol_type = other DNA
agaaaatgattctcagaacact

SEQ ID NO: 53982 - DNA, 22 bp, synthetic construct
  misc_feature 1..22: note = chemically synthesized
  source 1..22: mol_type = other DNA
tcagaacactaactagaccatg

SEQ ID NO: 53983 - DNA, 22 bp, synthetic construct
  misc_feature 1..22: note = chemically synthesized
  source 1..22: mol_type = other DNA
agaacactaactagaccatgag

SEQ ID NO: 53984 - DNA, 22 bp, synthetic construct
  misc_feature 1..22: note = chemically synthesized
  source 1..22: mol_type = other DNA
actagaccatgaggtgccacaa

SEQ ID NO: 53985 - DNA, 22 bp, synthetic construct
  misc_feature 1..22: note = chemically synthesized
  source 1..22: mol_type = other DNA
gaccatgaggtgccacaaaaca

SEQ ID NO: 53986 - DNA, 22 bp, synthetic construct
  misc_feature 1..22: note = chemically synthesized
  source 1..22: mol_type = other DNA
aggcctgttcatcaattttcta

SEQ ID NO: 53987 - DNA, 22 bp, synthetic construct
  misc_feature 1..22: note = chemically synthesized
  source 1..22: mol_type = other DNA
ttcatcaattttctacatgtca

SEQ ID NO: 53988 - DNA, 22 bp, synthetic construct
  misc_feature 1..22: note = chemically synthesized
  source 1..22: mol_type = other DNA
atcaattttctacatgtcaata

SEQ ID NO: 53989 - DNA, 22 bp, synthetic construct
  misc_feature 1..22: note = chemically synthesized
  source 1..22: mol_type = other DNA
tctacatgtcaataatgacatc

SEQ ID NO: 53990 - DNA, 22 bp, synthetic construct
  misc_feature 1..22: note = chemically synthesized
  source 1..22: mol_type = other DNA
ctacatgtcaataatgacatca

SEQ ID NO: 53991 - DNA, 22 bp, synthetic construct
  misc_feature 1..22: note = chemically synthesized
  source 1..22: mol_type = other DNA
tacatgtcaataatgacatcag

SEQ ID NO: 53992 - DNA, 22 bp, synthetic construct
  misc_feature 1..22: note = chemically synthesized
  source 1..22: mol_type = other DNA
catgtcaataatgacatcaggt

SEQ ID NO: 53993 - DNA, 22 bp, synthetic construct
  misc_feature 1..22: note = chemically synthesized
  source 1..22: mol_type = other DNA
gcgttctcagcctctgagaggg

SEQ ID NO: 53994 - DNA, 22 bp, synthetic construct
  misc_feature 1..22: note = chemically synthesized
  source 1..22: mol_type = other DNA
tcagcctctgagagggaggtca

SEQ ID NO: 53995 - DNA, 22 bp, synthetic construct
  misc_feature 1..22: note = chemically synthesized
  source 1..22: mol_type = other DNA
agcctctgagagggaggtcaaa

SEQ ID NO: 53996 - DNA, 22 bp, synthetic construct
  misc_feature 1..22: note = chemically synthesized
  source 1..22: mol_type = other DNA
tgagagggaggtcaaagttttc

SEQ ID NO: 53997 - DNA, 22 bp, synthetic construct
  misc_feature 1..22: note = chemically synthesized
  source 1..22: mol_type = other DNA
agagggaggtcaaagttttcct

SEQ ID NO: 53998 - DNA, 22 bp, synthetic construct
  misc_feature 1..22: note = chemically synthesized
  source 1..22: mol_type = other DNA
tcctgctctccccttcatgttt

SEQ ID NO: 53999 - DNA, 22 bp, synthetic construct
  misc_feature 1..22: note = chemically synthesized
  source 1..22: mol_type = other DNA
cctgctctccccttcatgtttc

SEQ ID NO: 54000 - DNA, 22 bp, synthetic construct
  misc_feature 1..22: note = chemically synthesized
  source 1..22: mol_type = other DNA
ctgctctccccttcatgtttcc

SEQ ID NO: 54001 - DNA, 22 bp, synthetic construct
  misc_feature 1..22: note = chemically synthesized
  source 1..22: mol_type = other DNA
ctctccccttcatgtttccagg

SEQ ID NO: 54002 - DNA, 22 bp, synthetic construct
  misc_feature 1..22: note = chemically synthesized
  source 1..22: mol_type = other DNA
tccccttcatgtttccaggtgt

SEQ ID NO: 54003 - DNA, 22 bp, synthetic construct
  misc_feature 1..22: note = chemically synthesized
  source 1..22: mol_type = other DNA
cccttcatgtttccaggtgttc

SEQ ID NO: 54004 - DNA, 22 bp, synthetic construct
  misc_feature 1..22: note = chemically synthesized
  source 1..22: mol_type = other DNA
catgtttccaggtgttccctga

SEQ ID NO: 54005 - DNA, 22 bp, synthetic construct
  misc_feature 1..22: note = chemically synthesized
  source 1..22: mol_type = other DNA
atgtttccaggtgttccctgac

SEQ ID NO: 54006 - DNA, 22 bp, synthetic construct
  misc_feature 1..22: note = chemically synthesized
  source 1..22: mol_type = other DNA
ccaggtgttccctgacttggat

SEQ ID NO: 54007 - DNA, 22 bp, synthetic construct
  misc_feature 1..22: note = chemically synthesized
  source 1..22: mol_type = other DNA
caggtgttccctgacttggatc

SEQ ID NO: 54008 - DNA, 22 bp, synthetic construct
  misc_feature 1..22: note = chemically synthesized
  source 1..22: mol_type = other DNA
cctgacttggatcaaatgcaga

SEQ ID NO: 54009 - DNA, 22 bp, synthetic construct
  misc_feature 1..22: note = chemically synthesized
  source 1..22: mol_type = other DNA
acttggatcaaatgcagagttt

SEQ ID NO: 54010 - DNA, 22 bp, synthetic construct
  misc_feature 1..22: note = chemically synthesized
  source 1..22: mol_type = other DNA
ggatcaaatgcagagtttggag

SEQ ID NO: 54011 - DNA, 22 bp, synthetic construct
  misc_feature 1..22: note = chemically synthesized
  source 1..22: mol_type = other DNA
gatcaaatgcagagtttggagg

SEQ ID NO: 54012 - DNA, 22 bp, synthetic construct
  misc_feature 1..22: note = chemically synthesized
  source 1..22: mol_type = other DNA
ggaggtgttgaggccaagggga

SEQ ID NO: 54013 - DNA, 22 bp, synthetic construct
  misc_feature 1..22: note = chemically synthesized
  source 1..22: mol_type = other DNA
gaggtgttgaggccaaggggat

SEQ ID NO: 54014 - DNA, 22 bp, synthetic construct
  misc_feature 1..22: note = chemically synthesized
  source 1..22: mol_type = other DNA
aggccaaggggattttccaggt

SEQ ID NO: 54015 - DNA, 22 bp, synthetic construct
  misc_feature 1..22: note = chemically synthesized
  source 1..22: mol_type = other DNA
tccaggtcagtcgtcatccaca

SEQ ID NO: 54016 - DNA, 22 bp, synthetic construct
  misc_feature 1..22: note = chemically synthesized
  source 1..22: mol_type = other DNA
ccaggtcagtcgtcatccacaa

SEQ ID NO: 54017 - DNA, 22 bp, synthetic construct
  misc_feature 1..22: note = chemically synthesized
  source 1..22: mol_type = other DNA
caggtcagtcgtcatccacaat

SEQ ID NO: 54018 - DNA, 22 bp, synthetic construct
  misc_feature 1..22: note = chemically synthesized
  source 1..22: mol_type = other DNA
atcctgccgctggacttaccct

SEQ ID NO: 54019 - DNA, 22 bp, synthetic construct
  misc_feature 1..22: note = chemically synthesized
  source 1..22: mol_type = other DNA
ccgctggacttaccctgctgcc

SEQ ID NO: 54020 - DNA, 22 bp, synthetic construct
  misc_feature 1..22: note = chemically synthesized
  source 1..22: mol_type = other DNA
gacttaccctgctgccctctcc

SEQ ID NO: 54021 - DNA, 22 bp, synthetic construct
  misc_feature 1..22: note = chemically synthesized
  source 1..22: mol_type = other DNA
accctgctgccctctccccaag

SEQ ID NO: 54022 - DNA, 22 bp, synthetic construct
  misc_feature 1..22: note = chemically synthesized
  source 1..22: mol_type = other DNA
ccctgctgccctctccccaagg

SEQ ID NO: 54023 - DNA, 22 bp, synthetic construct
  misc_feature 1..22: note = chemically synthesized
  source 1..22: mol_type = other DNA
ctgccctctccccaaggcccca

SEQ ID NO: 54024 - DNA, 22 bp, synthetic construct
  misc_feature 1..22: note = chemically synthesized
  source 1..22: mol_type = other DNA
ccctctccccaaggccccatca

SEQ ID NO: 54025 - DNA, 22 bp, synthetic construct
  misc_feature 1..22: note = chemically synthesized
  source 1..22: mol_type = other DNA
tccccaaggccccatcagggag

SEQ ID NO: 54026 - DNA, 22 bp, synthetic construct
  misc_feature 1..22: note = chemically synthesized
  source 1..22: mol_type = other DNA
cccaaggccccatcagggaggg

SEQ ID NO: 54027 - DNA, 22 bp, synthetic construct
  misc_feature 1..22: note = chemically synthesized
  source 1..22: mol_type = other DNA
caatcctcttgtcacctgtggc

SEQ ID NO: 54028 - DNA, 22 bp, synthetic construct
  misc_feature 1..22: note = chemically synthesized
  source 1..22: mol_type = other DNA
aatcctcttgtcacctgtggcc

SEQ ID NO: 54029 - DNA, 22 bp, synthetic construct
  misc_feature 1..22: note = chemically synthesized
  source 1..22: mol_type = other DNA
ttgtcacctgtggcctacctgc

SEQ ID NO: 54030 - DNA, 22 bp, synthetic construct
  misc_feature 1..22: note = chemically synthesized
  source 1..22: mol_type = other DNA
gtcacctgtggcctacctgccc

SEQ ID NO: 54031 - DNA, 22 bp, synthetic construct
  misc_feature 1..22: note = chemically synthesized
  source 1..22: mol_type = other DNA
tcacctgtggcctacctgccct

SEQ ID NO: 54032 - DNA, 22 bp, synthetic construct
  misc_feature 1..22: note = chemically synthesized
  source 1..22: mol_type = other DNA
tggcctacctgccctcagagat

SEQ ID NO: 54033 - DNA, 22 bp, synthetic construct
  misc_feature 1..22: note = chemically synthesized
  source 1..22: mol_type = other DNA
cctgccctcagagatgacatct

SEQ ID NO: 54034 - DNA, 22 bp, synthetic construct
  misc_feature 1..22: note = chemically synthesized
  source 1..22: mol_type = other DNA
ccctcagagatgacatctctat

SEQ ID NO: 54035 - DNA, 22 bp, synthetic construct
  misc_feature 1..22: note = chemically synthesized
  source 1..22: mol_type = other DNA
agagatgacatctctatgtcgg

SEQ ID NO: 54036 - DNA, 22 bp, synthetic construct
  misc_feature 1..22: note = chemically synthesized
  source 1..22: mol_type = other DNA
tatgtcggccactggatggcag

SEQ ID NO: 54037 - DNA, 22 bp, synthetic construct
  misc_feature 1..22: note = chemically synthesized
  source 1..22: mol_type = other DNA
tgtcggccactggatggcagca

SEQ ID NO: 54038 - DNA, 22 bp, synthetic construct
  misc_feature 1..22: note = chemically synthesized
  source 1..22: mol_type = other DNA
gatggcagcacctactcgcaga

SEQ ID NO: 54039 - DNA, 22 bp, synthetic construct
  misc_feature 1..22: note = chemically synthesized
  source 1..22: mol_type = other DNA
ctcgcagaccacatcaactttc

SEQ ID NO: 54040 - DNA, 22 bp, synthetic construct
  misc_feature 1..22: note = chemically synthesized
  source 1..22: mol_type = other DNA
gcagaccacatcaactttcctg

SEQ ID NO: 54041 - DNA, 22 bp, synthetic construct
  misc_feature 1..22: note = chemically synthesized
  source 1..22: mol_type = other DNA
tcctggcaacttgcggtaggtt

SEQ ID NO: 54042 - DNA, 22 bp, synthetic construct
  misc_feature 1..22: note = chemically synthesized
  source 1..22: mol_type = other DNA
cctggcaacttgcggtaggttt

SEQ ID NO: 54043 - DNA, 22 bp, synthetic construct
  misc_feature 1..22: note = chemically synthesized
  source 1..22: mol_type = other DNA
ctggcaacttgcggtaggtttt

SEQ ID NO: 54044 - DNA, 22 bp, synthetic construct
  misc_feature 1..22: note = chemically synthesized
  source 1..22: mol_type = other DNA
gcaacttgcggtaggttttcac

SEQ ID NO: 54045 - DNA, 22 bp, synthetic construct
  misc_feature 1..22: note = chemically synthesized
  source 1..22: mol_type = other DNA
gcggtaggttttcaccattatc

SEQ ID NO: 54046 - DNA, 22 bp, synthetic construct
  misc_feature 1..22: note = chemically synthesized
  source 1..22: mol_type = other DNA
cggtaggttttcaccattatca

SEQ ID NO: 54047 - DNA, 22 bp, synthetic construct
  misc_feature 1..22: note = chemically synthesized
  source 1..22: mol_type = other DNA
tcaccattatcaggatgtttgc

SEQ ID NO: 54048 - DNA, 22 bp, synthetic construct
  misc_feature 1..22: note = chemically synthesized
  source 1..22: mol_type = other DNA
caccattatcaggatgtttgcc

SEQ ID NO: 54049 - DNA, 22 bp, synthetic construct
  misc_feature 1..22: note = chemically synthesized
  source 1..22: mol_type = other DNA
accattatcaggatgtttgcct

SEQ ID NO: 54050 - DNA, 22 bp, synthetic construct
  misc_feature 1..22: note = chemically synthesized
  source 1..22: mol_type = other DNA
tcaggatgtttgccttgctcaa

SEQ ID NO: 54051 - DNA, 22 bp, synthetic construct
  misc_feature 1..22: note = chemically synthesized
  source 1..22: mol_type = other DNA
gccttgctcaaatagcagattc

SEQ ID NO: 54052 - DNA, 22 bp, synthetic construct
  misc_feature 1..22: note = chemically synthesized
  source 1..22: mol_type = other DNA
ccttgctcaaatagcagattct

SEQ ID NO: 54053 - DNA, 22 bp, synthetic construct
  misc_feature 1..22: note = chemically synthesized
  source 1..22: mol_type = other DNA
gctcaaatagcagattctagag

SEQ ID NO: 54054 - DNA, 22 bp, synthetic construct
  misc_feature 1..22: note = chemically synthesized
  source 1..22: mol_type = other DNA
ctcaaatagcagattctagaga

SEQ ID NO: 54055 - DNA, 22 bp, synthetic construct
  misc_feature 1..22: note = chemically synthesized
  source 1..22: mol_type = other DNA
aaatagcagattctagagaacg

SEQ ID NO: 54056 - DNA, 22 bp, synthetic construct
  misc_feature 1..22: note = chemically synthesized
  source 1..22: mol_type = other DNA
tagagaacggtgctccctcaca

SEQ ID NO: 54057 - DNA, 22 bp, synthetic construct
  misc_feature 1..22: note = chemically synthesized
  source 1..22: mol_type = other DNA
gagaacggtgctccctcacaca

SEQ ID NO: 54058 - DNA, 22 bp, synthetic construct
  misc_feature 1..22: note = chemically synthesized
  source 1..22: mol_type = other DNA
cctcacacaactatgtagtcca

SEQ ID NO: 54059 - DNA, 22 bp, synthetic construct
  misc_feature 1..22: note = chemically synthesized
  source 1..22: mol_type = other DNA
acacaactatgtagtccaggtg

SEQ ID NO: 54060 - DNA, 22 bp, synthetic construct
  misc_feature 1..22: note = chemically synthesized
  source 1..22: mol_type = other DNA
tgtagtccaggtgatgcaccct

SEQ ID NO: 54061 - DNA, 22 bp, synthetic construct
  misc_feature 1..22: note = chemically synthesized
  source 1..22: mol_type = other DNA
tgcccgatgcttggtagtcaga

SEQ ID NO: 54062 - DNA, 22 bp, synthetic construct
  misc_feature 1..22: note = chemically synthesized
  source 1..22: mol_type = other DNA
cccgatgcttggtagtcagaaa

SEQ ID NO: 54063 - DNA, 22 bp, synthetic construct
  misc_feature 1..22: note = chemically synthesized
  source 1..22: mol_type = other DNA
ggtagtcagaaacttccatcat

SEQ ID NO: 54064 - DNA, 22 bp, synthetic construct
  misc_feature 1..22: note = chemically synthesized
  source 1..22: mol_type = other DNA
gtagtcagaaacttccatcatg

SEQ ID NO: 54065 - DNA, 22 bp, synthetic construct
  misc_feature 1..22: note = chemically synthesized
  source 1..22: mol_type = other DNA
ccatcatgcagctctgcccaga

SEQ ID NO: 54066 - DNA, 22 bp, synthetic construct
  misc_feature 1..22: note = chemically synthesized
  source 1..22: mol_type = other DNA
catcatgcagctctgcccagat

SEQ ID NO: 54067 - DNA, 22 bp, synthetic construct
  misc_feature 1..22: note = chemically synthesized
  source 1..22: mol_type = other DNA
tgcccagattgagctgagctgg

SEQ ID NO: 54068 - DNA, 22 bp, synthetic construct
  misc_feature 1..22: note = chemically synthesized
  source 1..22: mol_type = other DNA
cccagattgagctgagctggcc

SEQ ID NO: 54069 - DNA, 22 bp, synthetic construct
  misc_feature 1..22: note = chemically synthesized
  source 1..22: mol_type = other DNA
agctgagctggcctctggagtg

SEQ ID NO: 54070 - DNA, 22 bp, synthetic construct
  misc_feature 1..22: note = chemically synthesized
  source 1..22: mol_type = other DNA
agctggcctctggagtgaggtg

SEQ ID NO: 54071 - DNA, 22 bp, synthetic construct
  misc_feature 1..22: note = chemically synthesized
  source 1..22: mol_type = other DNA
gcctctggagtgaggtgctggg

SEQ ID NO: 54072 - DNA, 22 bp, synthetic construct
  misc_feature 1..22: note = chemically synthesized
  source 1..22: mol_type = other DNA
tggagtgaggtgctgggacaaa

SEQ ID NO: 54073 - DNA, 22 bp, synthetic construct
  misc_feature 1..22: note = chemically synthesized
  source 1..22: mol_type = other DNA
gagtgaggtgctgggacaaaca

SEQ ID NO: 54074 - DNA, 22 bp, synthetic construct
  misc_feature 1..22: note = chemically synthesized
  source 1..22: mol_type = other DNA
ggacaaacatcttccatgctgc

SEQ ID NO: 54075 - DNA, 22 bp, synthetic construct
  misc_feature 1..22: note = chemically synthesized
  source 1..22: mol_type = other DNA
ccatgctgctcatgtcaactcc

SEQ ID NO: 54076 - DNA, 22 bp, synthetic construct
  misc_feature 1..22: note = chemically synthesized
  source 1..22: mol_type = other DNA
catgctgctcatgtcaactcca

SEQ ID NO: 54077 - DNA, 22 bp, synthetic construct
  misc_feature 1..22: note = chemically synthesized
  source 1..22: mol_type = other DNA
ctcatgtcaactccagatgcag

SEQ ID NO: 54078 - DNA, 22 bp, synthetic construct
  misc_feature 1..22: note = chemically synthesized
  source 1..22: mol_type = other DNA
atgtcaactccagatgcagtca

SEQ ID NO: 54079 - DNA, 22 bp, synthetic construct
  misc_feature 1..22: note = chemically synthesized
  source 1..22: mol_type = other DNA
cagatgcagtcaggtttctgaa

SEQ ID NO: 54080 - DNA, 22 bp, synthetic construct
  misc_feature 1..22: note = chemically synthesized
  source 1..22: mol_type = other DNA
ctgaaccaaagtcaatgatcta

SEQ ID NO: 54081 - DNA, 22 bp, synthetic construct
  misc_feature 1..22: note = chemically synthesized
  source 1..22: mol_type = other DNA
tgaaccaaagtcaatgatctaa

SEQ ID NO: 54082 - DNA, 22 bp, synthetic construct
  misc_feature 1..22: note = chemically synthesized
  source 1..22: mol_type = other DNA
aaccaaagtcaatgatctaagt

SEQ ID NO: 54083 - DNA, 22 bp, synthetic construct
  misc_feature 1..22: note = chemically synthesized
  source 1..22: mol_type = other DNA
agtgcagtcaaaggctctgggg

SEQ ID NO: 54084 - DNA, 22 bp, synthetic construct
  misc_feature 1..22: note = chemically synthesized
  source 1..22: mol_type = other DNA
tgggggaagaaagagagagtgc

SEQ ID NO: 54085 - DNA, 22 bp, synthetic construct
  misc_feature 1..22: note = chemically synthesized
  source 1..22: mol_type = other DNA
ggggaagaaagagagagtgcct

SEQ ID NO: 54086 - DNA, 22 bp, synthetic construct
  misc_feature 1..22: note = chemically synthesized
  source 1..22: mol_type = other DNA
atctcttgcctgtgccatgctc

SEQ ID NO: 54087 - DNA, 22 bp, synthetic construct
  misc_feature 1..22: note = chemically synthesized
  source 1..22: mol_type = other DNA
ttgcctgtgccatgctcgcaaa

SEQ ID NO: 54088 - DNA, 22 bp, synthetic construct
  misc_feature 1..22: note = chemically synthesized
  source 1..22: mol_type = other DNA
gcctgtgccatgctcgcaaagc

SEQ ID NO: 54089 - DNA, 22 bp, synthetic construct
  misc_feature 1..22: note = chemically synthesized
  source 1..22: mol_type = other DNA
cctgtgccatgctcgcaaagca

SEQ ID NO: 54090 - DNA, 22 bp, synthetic construct
  misc_feature 1..22: note = chemically synthesized
  source 1..22: mol_type = other DNA
tgccatgctcgcaaagcaagga

SEQ ID NO: 54091 - DNA, 22 bp, synthetic construct
  misc_feature 1..22: note = chemically synthesized
  source 1..22: mol_type = other DNA
gcaaagcaaggatttttgcaaa

SEQ ID NO: 54092 - DNA, 22 bp, synthetic construct
  misc_feature 1..22: note = chemically synthesized
  source 1..22: mol_type = other DNA
ttgcaaaattctaatgaaagct

SEQ ID NO: 54093 - DNA, 22 bp, synthetic construct
  misc_feature 1..22: note = chemically synthesized
  source 1..22: mol_type = other DNA
tgcaaaattctaatgaaagctg

SEQ ID NO: 54094 - DNA, 22 bp, synthetic construct
  misc_feature 1..22: note = chemically synthesized
  source 1..22: mol_type = other DNA
gcaaaattctaatgaaagctgg

SEQ ID NO: 54095 - DNA, 22 bp, synthetic construct
  misc_feature 1..22: note = chemically synthesized
  source 1..22: mol_type = other DNA
caaaattctaatgaaagctggg

SEQ ID NO: 54096 - DNA, 22 bp, synthetic construct
  misc_feature 1..22: note = chemically synthesized
  source 1..22: mol_type = other DNA
taatgaaagctgggcttgcaaa

SEQ ID NO: 54097 - DNA, 22 bp, synthetic construct
  misc_feature 1..22: note = chemically synthesized
  source 1..22: mol_type = other DNA
atgaaagctgggcttgcaaaat

SEQ ID NO: 54098 - DNA, 22 bp, synthetic construct
  misc_feature 1..22: note = chemically synthesized
  source 1..22: mol_type = other DNA
ggcttgcaaaattagaaaactg

SEQ ID NO: 54099 - DNA, 22 bp, synthetic construct
  misc_feature 1..22: note = chemically synthesized
  source 1..22: mol_type = other DNA
gcaaaattagaaaactggatta

SEQ ID NO: 54100 - DNA, 22 bp, synthetic construct
  misc_feature 1..22: note = chemically synthesized
  source 1..22: mol_type = other DNA
caaaattagaaaactggattat

SEQ ID NO: 54101 - DNA, 22 bp, synthetic construct
  misc_feature 1..22: note = chemically synthesized
  source 1..22: mol_type = other DNA
gaaaactggattatttgtgaga

SEQ ID NO: 54102 - DNA, 22 bp, synthetic construct
  misc_feature 1..22: note = chemically synthesized
  source 1..22: mol_type = other DNA
gattatttgtgagaacactgaa

SEQ ID NO: 54103 - DNA, 22 bp, synthetic construct
  misc_feature 1..22: note = chemically synthesized
  source 1..22: mol_type = other DNA
tttgtgagaacactgaaacatc

SEQ ID NO: 54104 - DNA, 22 bp, synthetic construct
  misc_feature 1..22: note = chemically synthesized
  source 1..22: mol_type = other DNA
gtgagaacactgaaacatccct

SEQ ID NO: 54105 - DNA, 22 bp, synthetic construct
  misc_feature 1..22: note = chemically synthesized
  source 1..22: mol_type = other DNA
tgagaacactgaaacatccctg

SEQ ID NO: 54106 - DNA, 22 bp, synthetic construct
  misc_feature 1..22: note = chemically synthesized
  source 1..22: mol_type = other DNA
aaacatccctgggtgtgtccat

SEQ ID NO: 54107 - DNA, 22 bp, synthetic construct
  misc_feature 1..22: note = chemically synthesized
  source 1..22: mol_type = other DNA
ggtgtgtccatctggaaaaaca

SEQ ID NO: 54108 - DNA, 22 bp, synthetic construct
  misc_feature 1..22: note = chemically synthesized
  source 1..22: mol_type = other DNA
gaaaaacagcatttcctctggc

SEQ ID NO: 54109 - DNA, 22 bp, synthetic construct
  misc_feature 1..22: note = chemically synthesized
  source 1..22: mol_type = other DNA
cctctggcaattttgcaaccgt

SEQ ID NO: 54110 - DNA, 22 bp, synthetic construct
  misc_feature 1..22: note = chemically synthesized
  source 1..22: mol_type = other DNA
ctctggcaattttgcaaccgtt

SEQ ID NO: 54111 - DNA, 22 bp, synthetic construct
  misc_feature 1..22: note = chemically synthesized
  source 1..22: mol_type = other DNA
tggcaattttgcaaccgttcta

SEQ ID NO: 54112 - DNA, 22 bp, synthetic construct
  misc_feature 1..22: note = chemically synthesized
  source 1..22: mol_type = other DNA
gcaattttgcaaccgttctatt

SEQ ID NO: 54113 - DNA, 22 bp, synthetic construct
  misc_feature 1..22: note = chemically synthesized
  source 1..22: mol_type = other DNA
tgcaaccgttctatttgaattt

SEQ ID NO: 54114 - DNA, 22 bp, synthetic construct
  misc_feature 1..22: note = chemically synthesized
  source 1..22: mol_type = other DNA
gcaaccgttctatttgaatttg

SEQ ID NO: 54115 - DNA, 22 bp, synthetic construct
  misc_feature 1..22: note = chemically synthesized
  source 1..22: mol_type = other DNA
caaccgttctatttgaatttgg

SEQ ID NO: 54116 - DNA, 22 bp, synthetic construct
  misc_feature 1..22: note = chemically synthesized
  source 1..22: mol_type = other DNA
tatttgaatttggcaaagaaaa

SEQ ID NO: 54117 - DNA, 22 bp, synthetic construct
  misc_feature 1..22: note = chemically synthesized
  source 1..22: mol_type = other DNA
tttgaatttggcaaagaaaata

SEQ ID NO: 54118 - DNA, 22 bp, synthetic construct
  misc_feature 1..22: note = chemically synthesized
  source 1..22: mol_type = other DNA
gaatttggcaaagaaaataaag

SEQ ID NO: 54119 - DNA, 22 bp, synthetic construct
  misc_feature 1..22: note = chemically synthesized
  source 1..22: mol_type = other DNA
aatttggcaaagaaaataaagc

SEQ ID NO: 54120 - DNA, 22 bp, synthetic construct
  misc_feature 1..22: note = chemically synthesized
  source 1..22: mol_type = other DNA
ggcaaagaaaataaagcagttt

SEQ ID NO: 54121 - DNA, 22 bp, synthetic construct
  misc_feature 1..22: note = chemically synthesized
  source 1..22: mol_type = other DNA
gcaaagaaaataaagcagtttt

SEQ ID NO: 54122 - DNA, 22 bp, synthetic construct
  misc_feature 1..22: note = chemically synthesized
  source 1..22: mol_type = other DNA
ttcacaaaagaataaacacaac

SEQ ID NO: 54123 - DNA, 22 bp, synthetic construct
  misc_feature 1..22: note = chemically synthesized
  source 1..22: mol_type = other DNA
tcacaaaagaataaacacaacc

SEQ ID NO: 54124 - DNA, 22 bp, synthetic construct
  misc_feature 1..22: note = chemically synthesized
  source 1..22: mol_type = other DNA
cacaaaagaataaacacaacca

SEQ ID NO: 54125 - DNA, 22 bp, synthetic construct
  misc_feature 1..22: note = chemically synthesized
  source 1..22: mol_type = other DNA
acaaaagaataaacacaaccag

SEQ ID NO: 54126 - DNA, 22 bp, synthetic construct
  misc_feature 1..22: note = chemically synthesized
  source 1..22: mol_type = other DNA
cactctcccaaattgtcaaaga

SEQ ID NO: 54127 - DNA, 22 bp, synthetic construct
  misc_feature 1..22: note = chemically synthesized
  source 1..22: mol_type = other DNA
actctcccaaattgtcaaagaa

SEQ ID NO: 54128 - DNA, 22 bp, synthetic construct
  misc_feature 1..22: note = chemically synthesized
  source 1..22: mol_type = other DNA
tcccaaattgtcaaagaagtat

SEQ ID NO: 54129 - DNA, 22 bp, synthetic construct
  misc_feature 1..22: note = chemically synthesized
  source 1..22: mol_type = other DNA
ccaaattgtcaaagaagtataa

SEQ ID NO: 54130 - DNA, 22 bp, synthetic construct
  misc_feature 1..22: note = chemically synthesized
  source 1..22: mol_type = other DNA
tcaaagaagtataaattagaaa

SEQ ID NO: 54131 - DNA, 22 bp, synthetic construct
  misc_feature 1..22: note = chemically synthesized
  source 1..22: mol_type = other DNA
gaaaatgaatcaggacaatttc

SEQ ID NO: 54132 - DNA, 22 bp, synthetic construct
  misc_feature 1..22: note = chemically synthesized
  source 1..22: mol_type = other DNA
caacctgttagattagctaata

SEQ ID NO: 54133 - DNA, 22 bp, synthetic construct
  misc_feature 1..22: note = chemically synthesized
  source 1..22: mol_type = other DNA
aacctgttagattagctaatat

SEQ ID NO: 54134 - DNA, 22 bp, synthetic construct
  misc_feature 1..22: note = chemically synthesized
  source 1..22: mol_type = other DNA
ttagattagctaatatttaaaa

SEQ ID NO: 54135 - DNA, 22 bp, synthetic construct
  misc_feature 1..22: note = chemically synthesized
  source 1..22: mol_type = other DNA
gattagctaatatttaaaaatt

SEQ ID NO: 54136 - DNA, 22 bp, synthetic construct
  misc_feature 1..22: note = chemically synthesized
  source 1..22: mol_type = other DNA
gctaatatttaaaaattgaaca

SEQ ID NO: 54137 - DNA, 22 bp, synthetic construct
  misc_feature 1..22: note = chemically synthesized
  source 1..22: mol_type = other DNA
atatttaaaaattgaacactca

SEQ ID NO: 54138 - DNA, 22 bp, synthetic construct
  misc_feature 1..22: note = chemically synthesized
  source 1..22: mol_type = other DNA
aaaaattgaacactcatacaag

SEQ ID NO: 54139 - DNA, 22 bp, synthetic construct
  misc_feature 1..22: note = chemically synthesized
  source 1..22: mol_type = other DNA
aaaattgaacactcatacaagt

SEQ ID NO: 54140 - DNA, 22 bp, synthetic construct
  misc_feature 1..22: note = chemically synthesized
  source 1..22: mol_type = other DNA
aacactcatacaagtgtggtga

SEQ ID NO: 54141 - DNA, 22 bp, synthetic construct
  misc_feature 1..22: note = chemically synthesized
  source 1..22: mol_type = other DNA
atacaagtgtggtgaagtgatt

SEQ ID NO: 54142 - DNA, 22 bp, synthetic construct
  misc_feature 1..22: note = chemically synthesized
  source 1..22: mol_type = other DNA
ttttctagtgacattttacact

SEQ ID NO: 54143 - DNA, 22 bp, synthetic construct
  misc_feature 1..22: note = chemically synthesized
  source 1..22: mol_type = other DNA
tctagtgacattttacactgtc

SEQ ID NO: 54144 - DNA, 22 bp, synthetic construct
  misc_feature 1..22: note = chemically synthesized
  source 1..22: mol_type = other DNA
ctagtgacattttacactgtca

SEQ ID NO: 54145 - DNA, 22 bp, synthetic construct
  misc_feature 1..22: note = chemically synthesized
  source 1..22: mol_type = other DNA
tagtgacattttacactgtcat

SEQ ID NO: 54146 - DNA, 22 bp, synthetic construct
  misc_feature 1..22: note = chemically synthesized
  source 1..22: mol_type = other DNA
gtgacattttacactgtcataa

SEQ ID NO: 54147 - DNA, 22 bp, synthetic construct
  misc_feature 1..22: note = chemically synthesized
  source 1..22: mol_type = other DNA
tacactgtcataaccttctaga

SEQ ID NO: 54148 - DNA, 22 bp, synthetic construct
  misc_feature 1..22: note = chemically synthesized
  source 1..22: mol_type = other DNA
acactgtcataaccttctagaa

SEQ ID NO: 54149 - DNA, 22 bp, synthetic construct
  misc_feature 1..22: note = chemically synthesized
  source 1..22: mol_type = other DNA
cactgtcataaccttctagaaa

SEQ ID NO: 54150 - DNA, 22 bp, synthetic construct
  misc_feature 1..22: note = chemically synthesized
  source 1..22: mol_type = other DNA
tcataaccttctagaaaataaa

SEQ ID NO: 54151 - DNA, 22 bp, synthetic construct
  misc_feature 1..22: note = chemically synthesized
  source 1..22: mol_type = other DNA
ctagaaaataaattggcagtgt

SEQ ID NO: 54152 - DNA, 22 bp, synthetic construct
  misc_feature 1..22: note = chemically synthesized
  source 1..22: mol_type = other DNA
tagaaaataaattggcagtgtt

SEQ ID NO: 54153 - DNA, 22 bp, synthetic construct
  misc_feature 1..22: note = chemically synthesized
  source 1..22: mol_type = other DNA
gaaaataaattggcagtgttat

SEQ ID NO: 54154 - DNA, 22 bp, synthetic construct
  misc_feature 1..22: note = chemically synthesized
  source 1..22: mol_type = other DNA
gcagtgttattgggagacagaa

SEQ ID NO: 54155 - DNA, 22 bp, synthetic construct
  misc_feature 1..22: note = chemically synthesized
  source 1..22: mol_type = other DNA
ttgggagacagaaatatgtcta

SEQ ID NO: 54156 - DNA, 22 bp, synthetic construct
  misc_feature 1..22: note = chemically synthesized
  source 1..22: mol_type = other DNA
ggagacagaaatatgtctatat

SEQ ID NO: 54157 - DNA, 22 bp, synthetic construct
  misc_feature 1..22: note = chemically synthesized
  source 1..22: mol_type = other DNA
tataatttatgggaacttaggc

SEQ ID NO: 54158 - DNA, 22 bp, synthetic construct
  misc_feature 1..22: note = chemically synthesized
  source 1..22: mol_type = other DNA
atgggaacttaggctcagaaaa

SEQ ID NO: 54159 - DNA, 22 bp, synthetic construct
  misc_feature 1..22: note = chemically synthesized
  source 1..22: mol_type = other DNA
tgggaacttaggctcagaaaat

SEQ ID NO: 54160 - DNA, 22 bp, synthetic construct
  misc_feature 1..22: note = chemically synthesized
  source 1..22: mol_type = other DNA
aggctcagaaaatattaaggaa

SEQ ID NO: 54161 - DNA, 22 bp, synthetic construct
  misc_feature 1..22: note = chemically synthesized
  source 1..22: mol_type = other DNA
ggctcagaaaatattaaggaat

SEQ ID NO: 54162 - DNA, 22 bp, synthetic construct
  misc_feature 1..22: note = chemically synthesized
  source 1..22: mol_type = other DNA
agaaaatattaaggaataagaa

SEQ ID NO: 54163 - DNA, 22 bp, synthetic construct
  misc_feature 1..22: note = chemically synthesized
  source 1..22: mol_type = other DNA
aggaataagaatgaactttatg

SEQ ID NO: 54164 - DNA, 22 bp, synthetic construct
  misc_feature 1..22: note = chemically synthesized
  source 1..22: mol_type = other DNA
tatgaacaaagatgtggagggt

SEQ ID NO: 54165 - DNA, 22 bp, synthetic construct
  misc_feature 1..22: note = chemically synthesized
  source 1..22: mol_type = other DNA
atgaacaaagatgtggagggtt

SEQ ID NO: 54166 - DNA, 22 bp, synthetic construct
  misc_feature 1..22: note = chemically synthesized
  source 1..22: mol_type = other DNA
tgaacaaagatgtggagggttg

SEQ ID NO: 54167 - DNA, 22 bp, synthetic construct
  misc_feature 1..22: note = chemically synthesized
  source 1..22: mol_type = other DNA
gaagcaagaggggggccaacgc

SEQ ID NO: 54168 - DNA, 22 bp, synthetic construct
  misc_feature 1..22: note = chemically synthesized
  source 1..22: mol_type = other DNA
gggcagtgactccgcagaccca

SEQ ID NO: 54169 - DNA, 22 bp, synthetic construct
  misc_feature 1..22: note = chemically synthesized
  source 1..22: mol_type = other DNA
ggcagtgactccgcagacccag

SEQ ID NO: 54170 - DNA, 22 bp, synthetic construct
  misc_feature 1..22: note = chemically synthesized
  source 1..22: mol_type = other DNA
cgcagacccaggctcaggttga

SEQ ID NO: 54171 - DNA, 22 bp, synthetic construct
  misc_feature 1..22: note = chemically synthesized
  source 1..22: mol_type = other DNA
aggttgaactagacaacctcct

SEQ ID NO: 54172 - DNA, 22 bp, synthetic construct
  misc_feature 1..22: note = chemically synthesized
  source 1..22: mol_type = other DNA
aactagacaacctccttacacc

SEQ ID NO: 54173 - DNA, 22 bp, synthetic construct
  misc_feature 1..22: note = chemically synthesized
  source 1..22: mol_type = other DNA
gacaacctccttacacctcagt

SEQ ID NO: 54174 - DNA, 22 bp, synthetic construct
  misc_feature 1..22: note = chemically synthesized
  source 1..22: mol_type = other DNA
cttacacctcagtttccttaac

SEQ ID NO: 54175 - DNA, 22 bp, synthetic construct
  misc_feature 1..22: note = chemically synthesized
  source 1..22: mol_type = other DNA
acacctcagtttccttaactgt

SEQ ID NO: 54176 - DNA, 22 bp, synthetic construct
  misc_feature 1..22: note = chemically synthesized
  source 1..22: mol_type = other DNA
cacctcagtttccttaactgta

SEQ ID NO: 54177 - DNA, 22 bp, synthetic construct
  misc_feature 1..22: note = chemically synthesized
  source 1..22: mol_type = other DNA
agtttccttaactgtagagcag

SEQ ID NO: 54178 - DNA, 22 bp, synthetic construct
  misc_feature 1..22: note = chemically synthesized
  source 1..22: mol_type = other DNA
ccttaactgtagagcaggagtg

SEQ ID NO: 54179 - DNA, 22 bp, synthetic construct
  misc_feature 1..22: note = chemically synthesized
  source 1..22: mol_type = other DNA
cttaactgtagagcaggagtga

SEQ ID NO: 54180 - DNA, 22 bp, synthetic construct
  misc_feature 1..22: note = chemically synthesized
  source 1..22: mol_type = other DNA
aactgtagagcaggagtgatgg

SEQ ID NO: 54181 - DNA, 22 bp, synthetic construct
  misc_feature 1..22: note = chemically synthesized
  source 1..22: mol_type = other DNA
actgtagagcaggagtgatgga

SEQ ID NO: 54182 - DNA, 22 bp, synthetic construct
  misc_feature 1..22: note = chemically synthesized
  source 1..22: mol_type = other DNA
tagagcaggagtgatggaactg

SEQ ID NO: 54183 - DNA, 22 bp, synthetic construct
  misc_feature 1..22: note = chemically synthesized
  source 1..22: mol_type = other DNA
cctgtttcataggactgttgtg

SEQ ID NO: 54184 - DNA, 22 bp, synthetic construct
  misc_feature 1..22: note = chemically synthesized
  source 1..22: mol_type = other DNA
tttcataggactgttgtgagga

SEQ ID NO: 54185 - DNA, 22 bp, synthetic construct
  misc_feature 1..22: note = chemically synthesized
  source 1..22: mol_type = other DNA
cataggactgttgtgaggatga

SEQ ID NO: 54186 - DNA, 22 bp, synthetic construct
  misc_feature 1..22: note = chemically synthesized
  source 1..22: mol_type = other DNA
ataggactgttgtgaggatgaa

SEQ ID NO: 54187 - DNA, 22 bp, synthetic construct
  misc_feature 1..22: note = chemically synthesized
  source 1..22: mol_type = other DNA
ttgtgaggatgaagtgagatac

SEQ ID NO: 54188 - DNA, 22 bp, synthetic construct
  misc_feature 1..22: note = chemically synthesized
  source 1..22: mol_type = other DNA
tgaggatgaagtgagatacacc

SEQ ID NO: 54189 - DNA, 22 bp, synthetic construct
  misc_feature 1..22: note = chemically synthesized
  source 1..22: mol_type = other DNA
taagcttgtgcctggaaaggat

SEQ ID NO: 54190 - DNA, 22 bp, synthetic construct
  misc_feature 1..22: note = chemically synthesized
  source 1..22: mol_type = other DNA
gtgcctggaaaggataatgctt

SEQ ID NO: 54191 - DNA, 22 bp, synthetic construct
  misc_feature 1..22: note = chemically synthesized
  source 1..22: mol_type = other DNA
tgcctggaaaggataatgctta

SEQ ID NO: 54192 - DNA, 22 bp, synthetic construct
  misc_feature 1..22: note = chemically synthesized
  source 1..22: mol_type = other DNA
gaaaggataatgcttagtaaat

SEQ ID NO: 54193 - DNA, 22 bp, synthetic construct
  misc_feature 1..22: note = chemically synthesized
  source 1..22: mol_type = other DNA
agtaaatgatgactattctttt

SEQ ID NO: 54194 - DNA, 22 bp, synthetic construct
  misc_feature 1..22: note = chemically synthesized
  source 1..22: mol_type = other DNA
gtaaatgatgactattcttttt

SEQ ID NO: 54195 - DNA, 22 bp, synthetic construct
  misc_feature 1..22: note = chemically synthesized
  source 1..22: mol_type = other DNA
ttcttttttattgcaataaaat

SEQ ID NO: 54196 - DNA, 22 bp, synthetic construct
  misc_feature 1..22: note = chemically synthesized
  source 1..22: mol_type = other DNA
ttttttattgcaataaaatgta

SEQ ID NO: 54197 - DNA, 22 bp, synthetic construct
  misc_feature 1..22: note = chemically synthesized
  source 1..22: mol_type = other DNA
ttttattgcaataaaatgtaca

SEQ ID NO: 54198 - DNA, 22 bp, synthetic construct
  misc_feature 1..22: note = chemically synthesized
  source 1..22: mol_type = other DNA
tttattgcaataaaatgtacac

SEQ ID NO: 54199 - DNA, 22 bp, synthetic construct
  misc_feature 1..22: note = chemically synthesized
  source 1..22: mol_type = other DNA
ttattgcaataaaatgtacaca

SEQ ID NO: 54200 - DNA, 22 bp, synthetic construct
  misc_feature 1..22: note = chemically synthesized
  source 1..22: mol_type = other DNA
tattgcaataaaatgtacacag

SEQ ID NO: 54201 - DNA, 22 bp, synthetic construct
  misc_feature 1..22: note = chemically synthesized
  source 1..22: mol_type = other DNA
attgcaataaaatgtacacagc

SEQ ID NO: 54202 - DNA, 22 bp, synthetic construct
  misc_feature 1..22: note = chemically synthesized
  source 1..22: mol_type = other DNA
ttgcaataaaatgtacacagcg

SEQ ID NO: 54203 - DNA, 22 bp, synthetic construct
  misc_feature 1..22: note = chemically synthesized
  source 1..22: mol_type = other DNA
caataaaatgtacacagcgtaa

SEQ ID NO: 54204 - DNA, 22 bp, synthetic construct
  misc_feature 1..22: note = chemically synthesized
  source 1..22: mol_type = other DNA
ctattttaaccatttttgcagg

SEQ ID NO: 54205 - DNA, 22 bp, synthetic construct
  misc_feature 1..22: note = chemically synthesized
  source 1..22: mol_type = other DNA
ttttaaccatttttgcagggta

SEQ ID NO: 54206 - DNA, 22 bp, synthetic construct
  misc_feature 1..22: note = chemically synthesized
  source 1..22: mol_type = other DNA
taaccatttttgcagggtacca

SEQ ID NO: 54207 - DNA, 22 bp, synthetic construct
  misc_feature 1..22: note = chemically synthesized
  source 1..22: mol_type = other DNA
aaccatttttgcagggtaccac

SEQ ID NO: 54208 - DNA, 22 bp, synthetic construct
  misc_feature 1..22: note = chemically synthesized
  source 1..22: mol_type = other DNA
accatttttgcagggtaccacc

SEQ ID NO: 54209 - DNA, 22 bp, synthetic construct
  misc_feature 1..22: note = chemically synthesized
  source 1..22: mol_type = other DNA
ttgcagggtaccaccaagtggc

SEQ ID NO: 54210 - DNA, 22 bp, synthetic construct
  misc_feature 1..22: note = chemically synthesized
  source 1..22: mol_type = other DNA
tgcagggtaccaccaagtggca

SEQ ID NO: 54211 - DNA, 22 bp, synthetic construct
  misc_feature 1..22: note = chemically synthesized
  source 1..22: mol_type = other DNA
gcagggtaccaccaagtggcat

SEQ ID NO: 54212 - DNA, 22 bp, synthetic construct
  misc_feature 1..22: note = chemically synthesized
  source 1..22: mol_type = other DNA
cagggtaccaccaagtggcatt

SEQ ID NO: 54213 - DNA, 22 bp, synthetic construct
  misc_feature 1..22: note = chemically synthesized
  source 1..22: mol_type = other DNA
agtacattcacagtggtgtgca

SEQ ID NO: 54214 - DNA, 22 bp, synthetic construct
  misc_feature 1..22: note = chemically synthesized
  source 1..22: mol_type = other DNA
gtacattcacagtggtgtgcaa

SEQ ID NO: 54215 - DNA, 22 bp, synthetic construct
  misc_feature 1..22: note = chemically synthesized
  source 1..22: mol_type = other DNA
acagtggtgtgcaaccatcatc

SEQ ID NO: 54216 - DNA, 22 bp, synthetic construct
  misc_feature 1..22: note = chemically synthesized
  source 1..22: mol_type = other DNA
ccagaatattttcctcatcccc

SEQ ID NO: 54217 - DNA, 22 bp, synthetic construct
  misc_feature 1..22: note = chemically synthesized
  source 1..22: mol_type = other DNA
cagaatattttcctcatcccca

SEQ ID NO: 54218 - DNA, 22 bp, synthetic construct
  misc_feature 1..22: note = chemically synthesized
  source 1..22: mol_type = other DNA
tcctcatccccaaaggaaacct

SEQ ID NO: 54219 - DNA, 22 bp, synthetic construct
  misc_feature 1..22: note = chemically synthesized
  source 1..22: mol_type = other DNA
cctcatccccaaaggaaacctc

SEQ ID NO: 54220 - DNA, 22 bp, synthetic construct
  misc_feature 1..22: note = chemically synthesized
  source 1..22: mol_type = other DNA
ctcatccccaaaggaaacctca

SEQ ID NO: 54221 - DNA, 22 bp, synthetic construct
  misc_feature 1..22: note = chemically synthesized
  source 1..22: mol_type = other DNA
atccccaaaggaaacctcatgc

SEQ ID NO: 54222 - DNA, 22 bp, synthetic construct
  misc_feature 1..22: note = chemically synthesized
  source 1..22: mol_type = other DNA
atgctcattaatcagtagctct

SEQ ID NO: 54223 - DNA, 22 bp, synthetic construct
  misc_feature 1..22: note = chemically synthesized
  source 1..22: mol_type = other DNA
attaatcagtagctctccttta

SEQ ID NO: 54224 - DNA, 22 bp, synthetic construct
  misc_feature 1..22: note = chemically synthesized
  source 1..22: mol_type = other DNA
atcagtagctctcctttaaaat

SEQ ID NO: 54225 - DNA, 22 bp, synthetic construct
  misc_feature 1..22: note = chemically synthesized
  source 1..22: mol_type = other DNA
tcctttaaaatattagttatga

SEQ ID NO: 54226 - DNA, 22 bp, synthetic construct
  misc_feature 1..22: note = chemically synthesized
  source 1..22: mol_type = other DNA
ctttaaaatattagttatgaag

SEQ ID NO: 54227 - DNA, 22 bp, synthetic construct
  misc_feature 1..22: note = chemically synthesized
  source 1..22: mol_type = other DNA
taaaatattagttatgaagatc

SEQ ID NO: 54228 - DNA, 22 bp, synthetic construct
  misc_feature 1..22: note = chemically synthesized
  source 1..22: mol_type = other DNA
aaaatattagttatgaagatca

SEQ ID NO: 54229 - DNA, 22 bp, synthetic construct
  misc_feature 1..22: note = chemically synthesized
  source 1..22: mol_type = other DNA
aaatattagttatgaagatcat

SEQ ID NO: 54230 - DNA, 22 bp, synthetic construct
  misc_feature 1..22: note = chemically synthesized
  source 1..22: mol_type = other DNA
gttatgaagatcatagcactat

SEQ ID NO: 54231 - DNA, 22 bp, synthetic construct
  misc_feature 1..22: note = chemically synthesized
  source 1..22: mol_type = other DNA
tgaagatcatagcactatacaa

SEQ ID NO: 54232 - DNA, 22 bp, synthetic construct
  misc_feature 1..22: note = chemically synthesized
  source 1..22: mol_type = other DNA
tacaaaactcattatgtaatgt

SEQ ID NO: 54233 - DNA, 22 bp, synthetic construct
  misc_feature 1..22: note = chemically synthesized
  source 1..22: mol_type = other DNA
attatgtaatgttgagtgaaaa

SEQ ID NO: 54234 - DNA, 22 bp, synthetic construct
  misc_feature 1..22: note = chemically synthesized
  source 1..22: mol_type = other DNA
tgtaatgttgagtgaaaaaatc

SEQ ID NO: 54235 - DNA, 22 bp, synthetic construct
  misc_feature 1..22: note = chemically synthesized
  source 1..22: mol_type = other DNA
agtgaaaaaatcagggtgtgaa

SEQ ID NO: 54236 - DNA, 22 bp, synthetic construct
  misc_feature 1..22: note = chemically synthesized
  source 1..22: mol_type = other DNA
tgtgatatgatgtaattagtga

SEQ ID NO: 54237 - DNA, 22 bp, synthetic construct
  misc_feature 1..22: note = chemically synthesized
  source 1..22: mol_type = other DNA
gtgatatgatgtaattagtgaa

SEQ ID NO: 54238 - DNA, 22 bp, synthetic construct
  misc_feature 1..22: note = chemically synthesized
  source 1..22: mol_type = other DNA
tgatatgatgtaattagtgaaa

SEQ ID NO: 54239 - DNA, 22 bp, synthetic construct
  misc_feature 1..22: note = chemically synthesized
  source 1..22: mol_type = other DNA
gtgaaagaagcatacaaaaagt

SEQ ID NO: 54240 - DNA, 22 bp, synthetic construct
  misc_feature 1..22: note = chemically synthesized
  source 1..22: mol_type = other DNA
aaaatataaaaacaatagcaat

SEQ ID NO: 54241 - DNA, 22 bp, synthetic construct
  misc_feature 1..22: note = chemically synthesized
  source 1..22: mol_type = other DNA
catttctcagactctacattta

SEQ ID NO: 54242 - DNA, 22 bp, synthetic construct
  misc_feature 1..22: note = chemically synthesized
  source 1..22: mol_type = other DNA
ctcagactctacatttaaacat

SEQ ID NO: 54243 - DNA, 22 bp, synthetic construct
  misc_feature 1..22: note = chemically synthesized
  source 1..22: mol_type = other DNA
tcagactctacatttaaacatt

SEQ ID NO: 54244 - DNA, 22 bp, synthetic construct
  misc_feature 1..22: note = chemically synthesized
  source 1..22: mol_type = other DNA
agactctacatttaaacattat

SEQ ID NO: 54245 - DNA, 22 bp, synthetic construct
  misc_feature 1..22: note = chemically synthesized
  source 1..22: mol_type = other DNA
tacatttaaacattattcttta

SEQ ID NO: 54246 - DNA, 22 bp, synthetic construct
  misc_feature 1..22: note = chemically synthesized
  source 1..22: mol_type = other DNA
catttaaacattattctttatg

SEQ ID NO: 54247 - DNA, 22 bp, synthetic construct
  misc_feature 1..22: note = chemically synthesized
  source 1..22: mol_type = other DNA
aaacattattctttatggtttt

SEQ ID NO: 54248 - DNA, 22 bp, synthetic construct
  misc_feature 1..22: note = chemically synthesized
  source 1..22: mol_type = other DNA
aacattattctttatggtttta

SEQ ID NO: 54249 - DNA, 22 bp, synthetic construct
  misc_feature 1..22: note = chemically synthesized
  source 1..22: mol_type = other DNA
ttctttatggttttaaaagcaa

SEQ ID NO: 54250 - DNA, 22 bp, synthetic construct
  misc_feature 1..22: note = chemically synthesized
  source 1..22: mol_type = other DNA
tttatggttttaaaagcaaaga

SEQ ID NO: 54251 - DNA, 22 bp, synthetic construct
  misc_feature 1..22: note = chemically synthesized
  source 1..22: mol_type = other DNA
tatggttttaaaagcaaagaaa

SEQ ID NO: 54252 - DNA, 22 bp, synthetic construct
  misc_feature 1..22: note = chemically synthesized
  source 1..22: mol_type = other DNA
atggttttaaaagcaaagaaaa

SEQ ID NO: 54253 - DNA, 22 bp, synthetic construct
  misc_feature 1..22: note = chemically synthesized
  source 1..22: mol_type = other DNA
tggttttaaaagcaaagaaaaa

SEQ ID NO: 54254 - DNA, 22 bp, synthetic construct
  misc_feature 1..22: note = chemically synthesized
  source 1..22: mol_type = other DNA
taaaagcaaagaaaaaggtaaa

SEQ ID NO: 54255 - DNA, 22 bp, synthetic construct
  misc_feature 1..22: note = chemically synthesized
  source 1..22: mol_type = other DNA
aaaagcaaagaaaaaggtaaag

SEQ ID NO: 54256 - DNA, 22 bp, synthetic construct
  misc_feature 1..22: note = chemically synthesized
  source 1..22: mol_type = other DNA
aaagcaaagaaaaaggtaaaga

SEQ ID NO: 54257 - DNA, 22 bp, synthetic construct
  misc_feature 1..22: note = chemically synthesized
  source 1..22: mol_type = other DNA
agattgttaaatccaggttttt

SEQ ID NO: 54258 - DNA, 22 bp, synthetic construct
  misc_feature 1..22: note = chemically synthesized
  source 1..22: mol_type = other DNA
ttaaatccaggtttttggaaca

SEQ ID NO: 54259 - DNA, 22 bp, synthetic construct
  misc_feature 1..22: note = chemically synthesized
  source 1..22: mol_type = other DNA
aatccaggtttttggaacatag

SEQ ID NO: 54260 - DNA, 22 bp, synthetic construct
  misc_feature 1..22: note = chemically synthesized
  source 1..22: mol_type = other DNA
ttggaacatagactcttatatg

SEQ ID NO: 54261 - DNA, 22 bp, synthetic construct
  misc_feature 1..22: note = chemically synthesized
  source 1..22: mol_type = other DNA
tggaacatagactcttatatga

SEQ ID NO: 54262 - DNA, 22 bp, synthetic construct
  misc_feature 1..22: note = chemically synthesized
  source 1..22: mol_type = other DNA
ggaacatagactcttatatgac

SEQ ID NO: 54263 - DNA, 22 bp, synthetic construct
  misc_feature 1..22: note = chemically synthesized
  source 1..22: mol_type = other DNA
gaacatagactcttatatgacg

SEQ ID NO: 54264 - DNA, 22 bp, synthetic construct
  misc_feature 1..22: note = chemically synthesized
  source 1..22: mol_type = other DNA
ttatatgacgtttacactctcc

SEQ ID NO: 54265 - DNA, 22 bp, synthetic construct
  misc_feature 1..22: note = chemically synthesized
  source 1..22: mol_type = other DNA
atatgacgtttacactctccag

SEQ ID NO: 54266 - DNA, 22 bp, synthetic construct
  misc_feature 1..22: note = chemically synthesized
  source 1..22: mol_type = other DNA
tatgacgtttacactctccagg

SEQ ID NO: 54267 - DNA, 22 bp, synthetic construct
  misc_feature 1..22: note = chemically synthesized
  source 1..22: mol_type = other DNA
acactctccagggttcagagag

SEQ ID NO: 54268 - DNA, 22 bp, synthetic construct
  misc_feature 1..22: note = chemically synthesized
  source 1..22: mol_type = other DNA
cactctccagggttcagagagt

SEQ ID NO: 54269 - DNA, 22 bp, synthetic construct
  misc_feature 1..22: note = chemically synthesized
  source 1..22: mol_type = other DNA
tccagggttcagagagtctggc

SEQ ID NO: 54270 - DNA, 22 bp, synthetic construct
  misc_feature 1..22: note = chemically synthesized
  source 1..22: mol_type = other DNA
cagggttcagagagtctggcag

SEQ ID NO: 54271 - DNA, 22 bp, synthetic construct
  misc_feature 1..22: note = chemically synthesized
  source 1..22: mol_type = other DNA
agagagtctggcagcattggga

SEQ ID NO: 54272 - DNA, 22 bp, synthetic construct
  misc_feature 1..22: note = chemically synthesized
  source 1..22: mol_type = other DNA
gcagcattgggagctgccttgt

SEQ ID NO: 54273 - DNA, 22 bp, synthetic construct
  misc_feature 1..22: note = chemically synthesized
  source 1..22: mol_type = other DNA
ggagctgccttgtgttctacag

SEQ ID NO: 54274 - DNA, 22 bp, synthetic construct
  misc_feature 1..22: note = chemically synthesized
  source 1..22: mol_type = other DNA
ccttgtgttctacagcctcacg

SEQ ID NO: 54275 - DNA, 22 bp, synthetic construct
  misc_feature 1..22: note = chemically synthesized
  source 1..22: mol_type = other DNA
gtgttctacagcctcacggaca

SEQ ID NO: 54276 - DNA, 22 bp, synthetic construct
  misc_feature 1..22: note = chemically synthesized
  source 1..22: mol_type = other DNA
tgttctacagcctcacggacag

SEQ ID NO: 54277 - DNA, 22 bp, synthetic construct
  misc_feature 1..22: note = chemically synthesized
  source 1..22: mol_type = other DNA
tacagcctcacggacagacagg

SEQ ID NO: 54278 - DNA, 22 bp, synthetic construct
  misc_feature 1..22: note = chemically synthesized
  source 1..22: mol_type = other DNA
cagcctcacggacagacaggag

SEQ ID NO: 54279 - DNA, 22 bp, synthetic construct
  misc_feature 1..22: note = chemically synthesized
  source 1..22: mol_type = other DNA
acggacagacaggaggtccatc

SEQ ID NO: 54280 - DNA, 22 bp, synthetic construct
  misc_feature 1..22: note = chemically synthesized
  source 1..22: mol_type = other DNA
ctctgttcttctggagtttcct

SEQ ID NO: 54281 - DNA, 22 bp, synthetic construct
  misc_feature 1..22: note = chemically synthesized
  source 1..22: mol_type = other DNA
tgttcttctggagtttccttgt

SEQ ID NO: 54282 - DNA, 22 bp, synthetic construct
  misc_feature 1..22: note = chemically synthesized
  source 1..22: mol_type = other DNA
ttcttctggagtttccttgtga

SEQ ID NO: 54283 - DNA, 22 bp, synthetic construct
  misc_feature 1..22: note = chemically synthesized
  source 1..22: mol_type = other DNA
ttctggagtttccttgtgaaca

SEQ ID NO: 54284 - DNA, 22 bp, synthetic construct
  misc_feature 1..22: note = chemically synthesized
  source 1..22: mol_type = other DNA
ctggagtttccttgtgaacatg

SEQ ID NO: 54285 - DNA, 22 bp, synthetic construct
  misc_feature 1..22: note = chemically synthesized
  source 1..22: mol_type = other DNA
tggagtttccttgtgaacatgt

SEQ ID NO: 54286 - DNA, 22 bp, synthetic construct
  misc_feature 1..22: note = chemically synthesized
  source 1..22: mol_type = other DNA
gagtttccttgtgaacatgttg

SEQ ID NO: 54287 - DNA, 22 bp, synthetic construct
  misc_feature 1..22: note = chemically synthesized
  source 1..22: mol_type = other DNA
ccttgtgaacatgttgtggacg

SEQ ID NO: 54288 - DNA, 22 bp, synthetic construct
  misc_feature 1..22: note = chemically synthesized
  source 1..22: mol_type = other DNA
cttgtgaacatgttgtggacgt

SEQ ID NO: 54289 - DNA, 22 bp, synthetic construct
  misc_feature 1..22: note = chemically synthesized
  source 1..22: mol_type = other DNA
gtgaacatgttgtggacgtagt

SEQ ID NO: 54290 - DNA, 22 bp, synthetic construct
  misc_feature 1..22: note = chemically synthesized
  source 1..22: mol_type = other DNA
tgaacatgttgtggacgtagtt

SEQ ID NO: 54291 - DNA, 22 bp, synthetic construct
  misc_feature 1..22: note = chemically synthesized
  source 1..22: mol_type = other DNA
tggacgtagttaccatttcttt

SEQ ID NO: 54292 - DNA, 22 bp, synthetic construct
  misc_feature 1..22: note = chemically synthesized
  source 1..22: mol_type = other DNA
ccatttctttcatctttttaaa

SEQ ID NO: 54293 - DNA, 22 bp, synthetic construct
  misc_feature 1..22: note = chemically synthesized
  source 1..22: mol_type = other DNA
ctttcatctttttaaacacagg

SEQ ID NO: 54294 - DNA, 22 bp, synthetic construct
  misc_feature 1..22: note = chemically synthesized
  source 1..22: mol_type = other DNA
tttcatctttttaaacacaggt

SEQ ID NO: 54295 - DNA, 22 bp, synthetic construct
  misc_feature 1..22: note = chemically synthesized
  source 1..22: mol_type = other DNA
tcatctttttaaacacaggtac

SEQ ID NO: 54296 - DNA, 22 bp, synthetic construct
  misc_feature 1..22: note = chemically synthesized
  source 1..22: mol_type = other DNA
catctttttaaacacaggtacc

SEQ ID NO: 54297 - DNA, 22 bp, synthetic construct
  misc_feature 1..22: note = chemically synthesized
  source 1..22: mol_type = other DNA
atctttttaaacacaggtacct

SEQ ID NO: 54298 - DNA, 22 bp, synthetic construct
  misc_feature 1..22: note = chemically synthesized
  source 1..22: mol_type = other DNA
tttaaacacaggtacctttggg

SEQ ID NO: 54299 - DNA, 22 bp, synthetic construct
  misc_feature 1..22: note = chemically synthesized
  source 1..22: mol_type = other DNA
ttaaacacaggtacctttgggg

SEQ ID NO: 54300 - DNA, 22 bp, synthetic construct
  misc_feature 1..22: note = chemically synthesized
  source 1..22: mol_type = other DNA
taaacacaggtacctttggggc

SEQ ID NO: 54301 - DNA, 22 bp, synthetic construct
  misc_feature 1..22: note = chemically synthesized
  source 1..22: mol_type = other DNA
aaacacaggtacctttggggct

SEQ ID NO: 54302 - DNA, 22 bp, synthetic construct
  misc_feature 1..22: note = chemically synthesized
  source 1..22: mol_type = other DNA
aacacaggtacctttggggctg

SEQ ID NO: 54303 - DNA, 22 bp, synthetic construct
  misc_feature 1..22: note = chemically synthesized
  source 1..22: mol_type = other DNA
tggggctggctttctcaaggaa

SEQ ID NO: 54304 - DNA, 22 bp, synthetic construct
  misc_feature 1..22: note = chemically synthesized
  source 1..22: mol_type = other DNA
ggggctggctttctcaaggaag

SEQ ID NO: 54305 - DNA, 22 bp, synthetic construct
  misc_feature 1..22: note = chemically synthesized
  source 1..22: mol_type = other DNA
gggctggctttctcaaggaagc

SEQ ID NO: 54306 - DNA, 22 bp, synthetic construct
  misc_feature 1..22: note = chemically synthesized
  source 1..22: mol_type = other DNA
gctttctcaaggaagcccagct

SEQ ID NO: 54307 - DNA, 22 bp, synthetic construct
  misc_feature 1..22: note = chemically synthesized
  source 1..22: mol_type = other DNA
tctcaaggaagcccagctccct

SEQ ID NO: 54308 - DNA, 22 bp, synthetic construct
  misc_feature 1..22: note = chemically synthesized
  source 1..22: mol_type = other DNA
ctcaaggaagcccagctccctg

SEQ ID NO: 54309 - DNA, 22 bp, synthetic construct
  misc_feature 1..22: note = chemically synthesized
  source 1..22: mol_type = other DNA
tcaaggaagcccagctccctgt

SEQ ID NO: 54310 - DNA, 22 bp, synthetic construct
  misc_feature 1..22: note = chemically synthesized
  source 1..22: mol_type = other DNA
aaggaagcccagctccctgtga

SEQ ID NO: 54311 - DNA, 22 bp, synthetic construct
  misc_feature 1..22: note = chemically synthesized
  source 1..22: mol_type = other DNA
cctgtgattgagaatgaagtgt

SEQ ID NO: 54312 - DNA, 22 bp, synthetic construct
  misc_feature 1..22: note = chemically synthesized
  source 1..22: mol_type = other DNA
tgattgagaatgaagtgtgcaa

SEQ ID NO: 54313 - DNA, 22 bp, synthetic construct
  misc_feature 1..22: note = chemically synthesized
  source 1..22: mol_type = other DNA
agaatgaagtgtgcaatcgcta

SEQ ID NO: 54314 - DNA, 22 bp, synthetic construct
  misc_feature 1..22: note = chemically synthesized
  source 1..22: mol_type = other DNA
tgagtttctgaatggaagagtc

SEQ ID NO: 54315 - DNA, 22 bp, synthetic construct
  misc_feature 1..22: note = chemically synthesized
  source 1..22: mol_type = other DNA
ctgaatggaagagtcaaatcca

SEQ ID NO: 54316 - DNA, 22 bp, synthetic construct
  misc_feature 1..22: note = chemically synthesized
  source 1..22: mol_type = other DNA
tgaatggaagagtcaaatccac

SEQ ID NO: 54317 - DNA, 22 bp, synthetic construct
  misc_feature 1..22: note = chemically synthesized
  source 1..22: mol_type = other DNA
aatggaagagtcaaatccactg

SEQ ID NO: 54318 - DNA, 22 bp, synthetic construct
  misc_feature 1..22: note = chemically synthesized
  source 1..22: mol_type = other DNA
agctctgtgctgggcatttggc

SEQ ID NO: 54319 - DNA, 22 bp, synthetic construct
  misc_feature 1..22: note = chemically synthesized
  source 1..22: mol_type = other DNA
tgtgctgggcatttggctggag

SEQ ID NO: 54320 - DNA, 22 bp, synthetic construct
  misc_feature 1..22: note = chemically synthesized
  source 1..22: mol_type = other DNA
tgctgggcatttggctggaggc

SEQ ID NO: 54321 - DNA, 22 bp, synthetic construct
  misc_feature 1..22: note = chemically synthesized
  source 1..22: mol_type = other DNA
ggcatttggctggaggcattga

SEQ ID NO: 54322 - DNA, 22 bp, synthetic construct
  misc_feature 1..22: note = chemically synthesized
  source 1..22: mol_type = other DNA
ggctggaggcattgacagttgc

SEQ ID NO: 54323 - DNA, 22 bp, synthetic construct
  misc_feature 1..22: note = chemically synthesized
  source 1..22: mol_type = other DNA
gctggaggcattgacagttgca

SEQ ID NO: 54324 - DNA, 22 bp, synthetic construct
  misc_feature 1..22: note = chemically synthesized
  source 1..22: mol_type = other DNA
gaggcattgacagttgcaaggt

SEQ ID NO: 54325 - DNA, 22 bp, synthetic construct
  misc_feature 1..22: note = chemically synthesized
  source 1..22: mol_type = other DNA
acagttgcaaggtaagaaaaga

SEQ ID NO: 54326 - DNA, 22 bp, synthetic construct
  misc_feature 1..22: note = chemically synthesized
  source 1..22: mol_type = other DNA
caaggtaagaaaagatcaagag

SEQ ID NO: 54327 - DNA, 22 bp, synthetic construct
  misc_feature 1..22: note = chemically synthesized
  source 1..22: mol_type = other DNA
gtcttgtgctctcctgtctcag

SEQ ID NO: 54328 - DNA, 22 bp, synthetic construct
  misc_feature 1..22: note = chemically synthesized
  source 1..22: mol_type = other DNA
gtgctctcctgtctcagtctca

SEQ ID NO: 54329 - DNA, 22 bp, synthetic construct
  misc_feature 1..22: note = chemically synthesized
  source 1..22: mol_type = other DNA
tgctctcctgtctcagtctcag

SEQ ID NO: 54330 - DNA, 22 bp, synthetic construct
  misc_feature 1..22: note = chemically synthesized
  source 1..22: mol_type = other DNA
tcctgtctcagtctcagtccct

SEQ ID NO: 54331 - DNA, 22 bp, synthetic construct
  misc_feature 1..22: note = chemically synthesized
  source 1..22: mol_type = other DNA
ctgtctcagtctcagtccctta

SEQ ID NO: 54332 - DNA, 22 bp, synthetic construct
  misc_feature 1..22: note = chemically synthesized
  source 1..22: mol_type = other DNA
tctcagtctcagtcccttagac

SEQ ID NO: 54333 - DNA, 22 bp, synthetic construct
  misc_feature 1..22: note = chemically synthesized
  source 1..22: mol_type = other DNA
agtctcagtcccttagacttga

SEQ ID NO: 54334 - DNA, 22 bp, synthetic construct
  misc_feature 1..22: note = chemically synthesized
  source 1..22: mol_type = other DNA
agtcccttagacttgagtccca

SEQ ID NO: 54335 - DNA, 22 bp, synthetic construct
  misc_feature 1..22: note = chemically synthesized
  source 1..22: mol_type = other DNA
agacttgagtcccaaagtagcg

SEQ ID NO: 54336 - DNA, 22 bp, synthetic construct
  misc_feature 1..22: note = chemically synthesized
  source 1..22: mol_type = other DNA
gacttgagtcccaaagtagcga

SEQ ID NO: 54337 - DNA, 22 bp, synthetic construct
  misc_feature 1..22: note = chemically synthesized
  source 1..22: mol_type = other DNA
gagtcccaaagtagcgaattca

SEQ ID NO: 54338 - DNA, 22 bp, synthetic construct
  misc_feature 1..22: note = chemically synthesized
  source 1..22: mol_type = other DNA
agtcccaaagtagcgaattcaa

SEQ ID NO: 54339 - DNA, 22 bp, synthetic construct
  misc_feature 1..22: note = chemically synthesized
  source 1..22: mol_type = other DNA
aagtaggatttaatcaatggaa

SEQ ID NO: 54340 - DNA, 22 bp, synthetic construct
  misc_feature 1..22: note = chemically synthesized
  source 1..22: mol_type = other DNA
aatcaatggaagaccccagtct

SEQ ID NO: 54341 - DNA, 22 bp, synthetic construct
  misc_feature 1..22: note = chemically synthesized
  source 1..22: mol_type = other DNA
atcaatggaagaccccagtcta

SEQ ID NO: 54342 - DNA, 22 bp, synthetic construct
  misc_feature 1..22: note = chemically synthesized
  source 1..22: mol_type = other DNA
agtgttgctcagaaactcccta

SEQ ID NO: 54343 - DNA, 22 bp, synthetic construct
  misc_feature 1..22: note = chemically synthesized
  source 1..22: mol_type = other DNA
ctcagaaactccctagatctgt

SEQ ID NO: 54344 - DNA, 22 bp, synthetic construct
  misc_feature 1..22: note = chemically synthesized
  source 1..22: mol_type = other DNA
agaaactccctagatctgtccc

SEQ ID NO: 54345 - DNA, 22 bp, synthetic construct
  misc_feature 1..22: note = chemically synthesized
  source 1..22: mol_type = other DNA
cctagatctgtcccaaatgtat

SEQ ID NO: 54346 - DNA, 22 bp, synthetic construct
  misc_feature 1..22: note = chemically synthesized
  source 1..22: mol_type = other DNA
gatctgtcccaaatgtatattc

SEQ ID NO: 54347 - DNA, 22 bp, synthetic construct
  misc_feature 1..22: note = chemically synthesized
  source 1..22: mol_type = other DNA
tcccaaatgtatattcagatca

SEQ ID NO: 54348 - DNA, 22 bp, synthetic construct
  misc_feature 1..22: note = chemically synthesized
  source 1..22: mol_type = other DNA
agatcatccaaggggacttctt

SEQ ID NO: 54349 - DNA, 22 bp, synthetic construct
  misc_feature 1..22: note = chemically synthesized
  source 1..22: mol_type = other DNA
cttggggcttgagttccagatc

SEQ ID NO: 54350 - DNA, 22 bp, synthetic construct
  misc_feature 1..22: note = chemically synthesized
  source 1..22: mol_type = other DNA
ttggggcttgagttccagatca

SEQ ID NO: 54351 - DNA, 22 bp, synthetic construct
  misc_feature 1..22: note = chemically synthesized
  source 1..22: mol_type = other DNA
ggggcttgagttccagatcagc

SEQ ID NO: 54352 - DNA, 22 bp, synthetic construct
  misc_feature 1..22: note = chemically synthesized
  source 1..22: mol_type = other DNA
gggcttgagttccagatcagca

SEQ ID NO: 54353 - DNA, 22 bp, synthetic construct
  misc_feature 1..22: note = chemically synthesized
  source 1..22: mol_type = other DNA
gagttccagatcagcagcaagg

SEQ ID NO: 54354 - DNA, 22 bp, synthetic construct
  misc_feature 1..22: note = chemically synthesized
  source 1..22: mol_type = other DNA
agttccagatcagcagcaaggg

SEQ ID NO: 54355 - DNA, 22 bp, synthetic construct
  misc_feature 1..22: note = chemically synthesized
  source 1..22: mol_type = other DNA
cagatcagcagcaagggagcca

SEQ ID NO: 54356 - DNA, 22 bp, synthetic construct
  misc_feature 1..22: note = chemically synthesized
  source 1..22: mol_type = other DNA
cctcagaccactcaccctcctg

SEQ ID NO: 54357 - DNA, 22 bp, synthetic construct
  misc_feature 1..22: note = chemically synthesized
  source 1..22: mol_type = other DNA
agaccactcaccctcctggggt

SEQ ID NO: 54358 - DNA, 22 bp, synthetic construct
  misc_feature 1..22: note = chemically synthesized
  source 1..22: mol_type = other DNA
accctcctggggtgtcccggtg

SEQ ID NO: 54359 - DNA, 22 bp, synthetic construct
  misc_feature 1..22: note = chemically synthesized
  source 1..22: mol_type = other DNA
ctggggtgtcccggtggccagg

SEQ ID NO: 54360 - DNA, 22 bp, synthetic construct
  misc_feature 1..22: note = chemically synthesized
  source 1..22: mol_type = other DNA
gggtgtcccggtggccagggac

SEQ ID NO: 54361 - DNA, 22 bp, synthetic construct
  misc_feature 1..22: note = chemically synthesized
  source 1..22: mol_type = other DNA
aagtggtgatttttctggtagg

SEQ ID NO: 54362 - DNA, 22 bp, synthetic construct
  misc_feature 1..22: note = chemically synthesized
  source 1..22: mol_type = other DNA
ttctggtagggaaggaggtaga

SEQ ID NO: 54363 - DNA, 22 bp, synthetic construct
  misc_feature 1..22: note = chemically synthesized
  source 1..22: mol_type = other DNA
tctggtagggaaggaggtagag

SEQ ID NO: 54364 - DNA, 22 bp, synthetic construct
  misc_feature 1..22: note = chemically synthesized
  source 1..22: mol_type = other DNA
ctggtagggaaggaggtagagg

SEQ ID NO: 54365 - DNA, 22 bp, synthetic construct
  misc_feature 1..22: note = chemically synthesized
  source 1..22: mol_type = other DNA
tggtagggaaggaggtagaggg

SEQ ID NO: 54366 - DNA, 22 bp, synthetic construct
  misc_feature 1..22: note = chemically synthesized
  source 1..22: mol_type = other DNA
gtagggaaggaggtagagggta

SEQ ID NO: 54367 - DNA, 22 bp, synthetic construct
  misc_feature 1..22: note = chemically synthesized
  source 1..22: mol_type = other DNA
actgcacacaatatctgagact

SEQ ID NO: 54368 - DNA, 22 bp, synthetic construct
  misc_feature 1..22: note = chemically synthesized
  source 1..22: mol_type = other DNA
cacacaatatctgagactggag

SEQ ID NO: 54369 - DNA, 22 bp, synthetic construct
  misc_feature 1..22: note = chemically synthesized
  source 1..22: mol_type = other DNA
agactggagctcagatattgct

SEQ ID NO: 54370 - DNA, 22 bp, synthetic construct
  misc_feature 1..22: note = chemically synthesized
  source 1..22: mol_type = other DNA
gagctcagatattgctgatgat

SEQ ID NO: 54371 - DNA, 22 bp, synthetic construct
  misc_feature 1..22: note = chemically synthesized
  source 1..22: mol_type = other DNA
agatattgctgatgatcagagt

SEQ ID NO: 54372 - DNA, 22 bp, synthetic construct
  misc_feature 1..22: note = chemically synthesized
  source 1..22: mol_type = other DNA
ctgatgatcagagttggcgtgt

SEQ ID NO: 54373 - DNA, 22 bp, synthetic construct
  misc_feature 1..22: note = chemically synthesized
  source 1..22: mol_type = other DNA
atgatcagagttggcgtgtctc

SEQ ID NO: 54374 - DNA, 22 bp, synthetic construct
  misc_feature 1..22: note = chemically synthesized
  source 1..22: mol_type = other DNA
gcgtgtctccccaattgattta

SEQ ID NO: 54375 - DNA, 22 bp, synthetic construct
  misc_feature 1..22: note = chemically synthesized
  source 1..22: mol_type = other DNA
cccaattgatttacaactgggg

SEQ ID NO: 54376 - DNA, 22 bp, synthetic construct
  misc_feature 1..22: note = chemically synthesized
  source 1..22: mol_type = other DNA
atttacaactggggcttggata

SEQ ID NO: 54377 - DNA, 22 bp, synthetic construct
  misc_feature 1..22: note = chemically synthesized
  source 1..22: mol_type = other DNA
acaactggggcttggatactgt

SEQ ID NO: 54378 - DNA, 22 bp, synthetic construct
  misc_feature 1..22: note = chemically synthesized
  source 1..22: mol_type = other DNA
caactggggcttggatactgtt

SEQ ID NO: 54379 - DNA, 22 bp, synthetic construct
  misc_feature 1..22: note = chemically synthesized
  source 1..22: mol_type = other DNA
gggcttggatactgttttaaac

SEQ ID NO: 54380 - DNA, 22 bp, synthetic construct
  misc_feature 1..22: note = chemically synthesized
  source 1..22: mol_type = other DNA
ggatactgttttaaacgggagg

SEQ ID NO: 54381 - DNA, 22 bp, synthetic construct
  misc_feature 1..22: note = chemically synthesized
  source 1..22: mol_type = other DNA
gatactgttttaaacgggagga

SEQ ID NO: 54382 - DNA, 22 bp, synthetic construct
  misc_feature 1..22: note = chemically synthesized
  source 1..22: mol_type = other DNA
ttttaaacgggaggagcctcct

SEQ ID NO: 54383 - DNA, 22 bp, synthetic construct
  misc_feature 1..22: note = chemically synthesized
  source 1..22: mol_type = other DNA
taaacgggaggagcctcctaac

SEQ ID NO: 54384 - DNA, 22 bp, synthetic construct
  misc_feature 1..22: note = chemically synthesized
  source 1..22: mol_type = other DNA
aaacgggaggagcctcctaacc

SEQ ID NO: 54385 - DNA, 22 bp, synthetic construct
  misc_feature 1..22: note = chemically synthesized
  source 1..22: mol_type = other DNA
aacgggaggagcctcctaacca

SEQ ID NO: 54386 - DNA, 22 bp, synthetic construct
  misc_feature 1..22: note = chemically synthesized
  source 1..22: mol_type = other DNA
ctaaccatcttgacacaaccac

SEQ ID NO: 54387 - DNA, 22 bp, synthetic construct
  misc_feature 1..22: note = chemically synthesized
  source 1..22: mol_type = other DNA
accatcttgacacaaccactga

SEQ ID NO: 54388 - DNA, 22 bp, synthetic construct
  misc_feature 1..22: note = chemically synthesized
  source 1..22: mol_type = other DNA
gacacaaccactgacgtgacta

SEQ ID NO: 54389 - DNA, 22 bp, synthetic construct
  misc_feature 1..22: note = chemically synthesized
  source 1..22: mol_type = other DNA
acacaaccactgacgtgactac

SEQ ID NO: 54390 - DNA, 22 bp, synthetic construct
  misc_feature 1..22: note = chemically synthesized
  source 1..22: mol_type = other DNA
acgtgactacactagagataga

SEQ ID NO: 54391 - DNA, 22 bp, synthetic construct
  misc_feature 1..22: note = chemically synthesized
  source 1..22: mol_type = other DNA
cactagagatagactctttcca

SEQ ID NO: 54392 - DNA, 22 bp, synthetic construct
  misc_feature 1..22: note = chemically synthesized
  source 1..22: mol_type = other DNA
gagatagactctttccacttaa

SEQ ID NO: 54393 - DNA, 22 bp, synthetic construct
  misc_feature 1..22: note = chemically synthesized
  source 1..22: mol_type = other DNA
tttccacttaattctaccactc

SEQ ID NO: 54394 - DNA, 22 bp, synthetic construct
  misc_feature 1..22: note = chemically synthesized
  source 1..22: mol_type = other DNA
tccacttaattctaccactctt

SEQ ID NO: 54395 - DNA, 22 bp, synthetic construct
  misc_feature 1..22: note = chemically synthesized
  source 1..22: mol_type = other DNA
ccacttaattctaccactcttg

SEQ ID NO: 54396 - DNA, 22 bp, synthetic construct
  misc_feature 1..22: note = chemically synthesized
  source 1..22: mol_type = other DNA
cacttaattctaccactcttgc

SEQ ID NO: 54397 - DNA, 22 bp, synthetic construct
  misc_feature 1..22: note = chemically synthesized
  source 1..22: mol_type = other DNA
aattctaccactcttgctttac

SEQ ID NO: 54398 - DNA, 22 bp, synthetic construct
  misc_feature 1..22: note = chemically synthesized
  source 1..22: mol_type = other DNA
attctaccactcttgctttact

SEQ ID NO: 54399 - DNA, 22 bp, synthetic construct
  misc_feature 1..22: note = chemically synthesized
  source 1..22: mol_type = other DNA
taccactcttgctttacttcat

SEQ ID NO: 54400 - DNA, 22 bp, synthetic construct
  misc_feature 1..22: note = chemically synthesized
  source 1..22: mol_type = other DNA
ccactcttgctttacttcatga

SEQ ID NO: 54401 - DNA, 22 bp, synthetic construct
  misc_feature 1..22: note = chemically synthesized
  source 1..22: mol_type = other DNA
ttgctttacttcatgagaacga

SEQ ID NO: 54402 - DNA, 22 bp, synthetic construct
  misc_feature 1..22: note = chemically synthesized
  source 1..22: mol_type = other DNA
gctttacttcatgagaacgaaa

SEQ ID NO: 54403 - DNA, 22 bp, synthetic construct
  misc_feature 1..22: note = chemically synthesized
  source 1..22: mol_type = other DNA
ctttacttcatgagaacgaaaa

SEQ ID NO: 54404 - DNA, 22 bp, synthetic construct
  misc_feature 1..22: note = chemically synthesized
  source 1..22: mol_type = other DNA
tacttcatgagaacgaaaatgt

SEQ ID NO: 54405 - DNA, 22 bp, synthetic construct
  misc_feature 1..22: note = chemically synthesized
  source 1..22: mol_type = other DNA
acttcatgagaacgaaaatgta

SEQ ID NO: 54406 - DNA, 22 bp, synthetic construct
  misc_feature 1..22: note = chemically synthesized
  source 1..22: mol_type = other DNA
cttcatgagaacgaaaatgtaa

SEQ ID NO: 54407 - DNA, 22 bp, synthetic construct
  misc_feature 1..22: note = chemically synthesized
  source 1..22: mol_type = other DNA
catgagaacgaaaatgtaagat

SEQ ID NO: 54408 - DNA, 22 bp, synthetic construct
  misc_feature 1..22: note = chemically synthesized
  source 1..22: mol_type = other DNA
atgagaacgaaaatgtaagatt

SEQ ID NO: 54409 - DNA, 22 bp, synthetic construct
  misc_feature 1..22: note = chemically synthesized
  source 1..22: mol_type = other DNA
caccatgaattcatttgcggaa

SEQ ID NO: 54410 - DNA, 22 bp, synthetic construct
  misc_feature 1..22: note = chemically synthesized
  source 1..22: mol_type = other DNA
atttgcggaaagattgatacta

SEQ ID NO: 54411 - DNA, 22 bp, synthetic construct
  misc_feature 1..22: note = chemically synthesized
  source 1..22: mol_type = other DNA
gcggaaagattgatactatgct

SEQ ID NO: 54412 - DNA, 22 bp, synthetic construct
  misc_feature 1..22: note = chemically synthesized
  source 1..22: mol_type = other DNA
cggaaagattgatactatgctt

SEQ ID NO: 54413 - DNA, 22 bp, synthetic construct
  misc_feature 1..22: note = chemically synthesized
  source 1..22: mol_type = other DNA
atactatgcttttattttattt

SEQ ID NO: 54414 - DNA, 22 bp, synthetic construct
  misc_feature 1..22: note = chemically synthesized
  source 1..22: mol_type = other DNA
tgcttttattttattttatttt

SEQ ID NO: 54415 - DNA, 22 bp, synthetic construct
  misc_feature 1..22: note = chemically synthesized
  source 1..22: mol_type = other DNA
ttattttattttattttatttt

SEQ ID NO: 54416 - DNA, 22 bp, synthetic construct
  misc_feature 1..22: note = chemically synthesized
  source 1..22: mol_type = other DNA
tattttattttattttatttta

SEQ ID NO: 54417 - DNA, 22 bp, synthetic construct
  misc_feature 1..22: note = chemically synthesized
  source 1..22: mol_type = other DNA
attttattttattttattttat

SEQ ID NO: 54418 - DNA, 22 bp, synthetic construct
  misc_feature 1..22: note = chemically synthesized
  source 1..22: mol_type = other DNA
ttttattttattttattttatt

SEQ ID NO: 54419 - DNA, 22 bp, synthetic construct
  misc_feature 1..22: note = chemically synthesized
  source 1..22: mol_type = other DNA
tattttattttattttatttta

SEQ ID NO: 54420 - DNA, 22 bp, synthetic construct
  misc_feature 1..22: note = chemically synthesized
  source 1..22: mol_type = other DNA
attttattttattttattttat

SEQ ID NO: 54421 - DNA, 22 bp, synthetic construct
  misc_feature 1..22: note = chemically synthesized
  source 1..22: mol_type = other DNA
ttttattttattttattttatt

SEQ ID NO: 54422 - DNA, 22 bp, synthetic construct
  misc_feature 1..22: note = chemically synthesized
  source 1..22: mol_type = other DNA
tattttattttattttatttta

SEQ ID NO: 54423 - DNA, 22 bp, synthetic construct
  misc_feature 1..22: note = chemically synthesized
  source 1..22: mol_type = other DNA
attttattttattttattttat

SEQ ID NO: 54424 - DNA, 22 bp, synthetic construct
  misc_feature 1..22: note = chemically synthesized
  source 1..22: mol_type = other DNA
ttttattttattttattttatt

SEQ ID NO: 54425 - DNA, 22 bp, synthetic construct
  misc_feature 1..22: note = chemically synthesized
  source 1..22: mol_type = other DNA
tattttattttattttatttta

SEQ ID NO: 54426 - DNA, 22 bp, synthetic construct
  misc_feature 1..22: note = chemically synthesized
  source 1..22: mol_type = other DNA
attttattttattttattttat

SEQ ID NO: 54427 - DNA, 22 bp, synthetic construct
  misc_feature 1..22: note = chemically synthesized
  source 1..22: mol_type = other DNA
ttttattttattttattttatt

SEQ ID NO: 54428 - DNA, 22 bp, synthetic construct
  misc_feature 1..22: note = chemically synthesized
  source 1..22: mol_type = other DNA
tattttattttattttatttta

SEQ ID NO: 54429 - DNA, 22 bp, synthetic construct
  misc_feature 1..22: note = chemically synthesized
  source 1..22: mol_type = other DNA
attttattttattttattttat

SEQ ID NO: 54430 - DNA, 22 bp, synthetic construct
  misc_feature 1..22: note = chemically synthesized
  source 1..22: mol_type = other DNA
ttttattttattttattttatt

SEQ ID NO: 54431 - DNA, 22 bp, synthetic construct
  misc_feature 1..22: note = chemically synthesized
  source 1..22: mol_type = other DNA
tattttattttattttattgag

SEQ ID NO: 54432 - DNA, 22 bp, synthetic construct
  misc_feature 1..22: note = chemically synthesized
  source 1..22: mol_type = other DNA
attttattttattttattgaga

SEQ ID NO: 54433 - DNA, 22 bp, synthetic construct
  misc_feature 1..22: note = chemically synthesized
  source 1..22: mol_type = other DNA
ttttattttattttattgagac

SEQ ID NO: 54434 - DNA, 22 bp, synthetic construct
  misc_feature 1..22: note = chemically synthesized
  source 1..22: mol_type = other DNA
tattttattttattgagactct

SEQ ID NO: 54435 - DNA, 22 bp, synthetic construct
  misc_feature 1..22: note = chemically synthesized
  source 1..22: mol_type = other DNA
attttattttattgagactctc

SEQ ID NO: 54436 - DNA, 22 bp, synthetic construct
  misc_feature 1..22: note = chemically synthesized
  source 1..22: mol_type = other DNA
ttttattttattgagactctca

SEQ ID NO: 54437 - DNA, 22 bp, synthetic construct
  misc_feature 1..22: note = chemically synthesized
  source 1..22: mol_type = other DNA
tattttattgagactctcaccc

SEQ ID NO: 54438 - DNA, 22 bp, synthetic construct
  misc_feature 1..22: note = chemically synthesized
  source 1..22: mol_type = other DNA
attttattgagactctcacccc

SEQ ID NO: 54439 - DNA, 22 bp, synthetic construct
  misc_feature 1..22: note = chemically synthesized
  source 1..22: mol_type = other DNA
ttttattgagactctcaccccg

SEQ ID NO: 54440 - DNA, 22 bp, synthetic construct
  misc_feature 1..22: note = chemically synthesized
  source 1..22: mol_type = other DNA
tattgagactctcaccccggtt

SEQ ID NO: 54441 - DNA, 22 bp, synthetic construct
  misc_feature 1..22: note = chemically synthesized
  source 1..22: mol_type = other DNA
attgagactctcaccccggttg

SEQ ID NO: 54442 - DNA, 22 bp, synthetic construct
  misc_feature 1..22: note = chemically synthesized
  source 1..22: mol_type = other DNA
ttgagactctcaccccggttga

SEQ ID NO: 54443 - DNA, 22 bp, synthetic construct
  misc_feature 1..22: note = chemically synthesized
  source 1..22: mol_type = other DNA
agactctcaccccggttgaagt

SEQ ID NO: 54444 - DNA, 22 bp, synthetic construct
  misc_feature 1..22: note = chemically synthesized
  source 1..22: mol_type = other DNA
tcaccccggttgaagtgcactg

SEQ ID NO: 54445 - DNA, 22 bp, synthetic construct
  misc_feature 1..22: note = chemically synthesized
  source 1..22: mol_type = other DNA
accccggttgaagtgcactgac

SEQ ID NO: 54446 - DNA, 22 bp, synthetic construct
  misc_feature 1..22: note = chemically synthesized
  source 1..22: mol_type = other DNA
aagtgcactgacgtgattttgg

SEQ ID NO: 54447 - DNA, 22 bp, synthetic construct
  misc_feature 1..22: note = chemically synthesized
  source 1..22: mol_type = other DNA
acgtgattttggctcactgcaa

SEQ ID NO: 54448 - DNA, 22 bp, synthetic construct
  misc_feature 1..22: note = chemically synthesized
  source 1..22: mol_type = other DNA
tggctcactgcaacttccacct

SEQ ID NO: 54449 - DNA, 22 bp, synthetic construct
  misc_feature 1..22: note = chemically synthesized
  source 1..22: mol_type = other DNA
ggctcactgcaacttccacctc

SEQ ID NO: 54450 - DNA, 22 bp, synthetic construct
  misc_feature 1..22: note = chemically synthesized
  source 1..22: mol_type = other DNA
gctcactgcaacttccacctcc

SEQ ID NO: 54451 - DNA, 22 bp, synthetic construct
  misc_feature 1..22: note = chemically synthesized
  source 1..22: mol_type = other DNA
actgcaacttccacctcctggg

SEQ ID NO: 54452 - DNA, 22 bp, synthetic construct
  misc_feature 1..22: note = chemically synthesized
  source 1..22: mol_type = other DNA
caacttccacctcctgggttca

SEQ ID NO: 54453 - DNA, 22 bp, synthetic construct
  misc_feature 1..22: note = chemically synthesized
  source 1..22: mol_type = other DNA
ccacctcctgggttcaagtgaa

SEQ ID NO: 54454 - DNA, 22 bp, synthetic construct
  misc_feature 1..22: note = chemically synthesized
  source 1..22: mol_type = other DNA
cacctcctgggttcaagtgaat

SEQ ID NO: 54455 - DNA, 22 bp, synthetic construct
  misc_feature 1..22: note = chemically synthesized
  source 1..22: mol_type = other DNA
ctgggttcaagtgaatactcca

SEQ ID NO: 54456 - DNA, 22 bp, synthetic construct
  misc_feature 1..22: note = chemically synthesized
  source 1..22: mol_type = other DNA
ggttcaagtgaatactccagcc

SEQ ID NO: 54457 - DNA, 22 bp, synthetic construct
  misc_feature 1..22: note = chemically synthesized
  source 1..22: mol_type = other DNA
aagtgaatactccagcctccct

SEQ ID NO: 54458 - DNA, 22 bp, synthetic construct
  misc_feature 1..22: note = chemically synthesized
  source 1..22: mol_type = other DNA
cagcctccctagtagctgggat

SEQ ID NO: 54459 - DNA, 22 bp, synthetic construct
  misc_feature 1..22: note = chemically synthesized
  source 1..22: mol_type = other DNA
cctagtagctgggattacaggt

SEQ ID NO: 54460 - DNA, 22 bp, synthetic construct
  misc_feature 1..22: note = chemically synthesized
  source 1..22: mol_type = other DNA
gtagctgggattacaggtgccc

SEQ ID NO: 54461 - DNA, 22 bp, synthetic construct
  misc_feature 1..22: note = chemically synthesized
  source 1..22: mol_type = other DNA
ggattacaggtgcccaccacca

SEQ ID NO: 54462 - DNA, 22 bp, synthetic construct
  misc_feature 1..22: note = chemically synthesized
  source 1..22: mol_type = other DNA
caggtgcccaccaccacgcctg

SEQ ID NO: 54463 - DNA, 22 bp, synthetic construct
  misc_feature 1..22: note = chemically synthesized
  source 1..22: mol_type = other DNA
gctaatttttgtatttttagta

SEQ ID NO: 54464 - DNA, 22 bp, synthetic construct
  misc_feature 1..22: note = chemically synthesized
  source 1..22: mol_type = other DNA
atttttgtatttttagtagaga

SEQ ID NO: 54465 - DNA, 22 bp, synthetic construct
  misc_feature 1..22: note = chemically synthesized
  source 1..22: mol_type = other DNA
ttgtatttttagtagagatggg

SEQ ID NO: 54466 - DNA, 22 bp, synthetic construct
  misc_feature 1..22: note = chemically synthesized
  source 1..22: mol_type = other DNA
tgtatttttagtagagatgggg

SEQ ID NO: 54467 - DNA, 22 bp, synthetic construct
  misc_feature 1..22: note = chemically synthesized
  source 1..22: mol_type = other DNA
gtatttttagtagagatggggt

SEQ ID NO: 54468 - DNA, 22 bp, synthetic construct
  misc_feature 1..22: note = chemically synthesized
  source 1..22: mol_type = other DNA
tatttttagtagagatggggtt

SEQ ID NO: 54469 - DNA, 22 bp, synthetic construct
  misc_feature 1..22: note = chemically synthesized
  source 1..22: mol_type = other DNA
ttagtagagatggggtttcacc

SEQ ID NO: 54470 - DNA, 22 bp, synthetic construct
  misc_feature 1..22: note = chemically synthesized
  source 1..22: mol_type = other DNA
tagtagagatggggtttcacca

SEQ ID NO: 54471 - DNA, 22 bp, synthetic construct
  misc_feature 1..22: note = chemically synthesized
  source 1..22: mol_type = other DNA
agtagagatggggtttcaccac

SEQ ID NO: 54472 - DNA, 22 bp, synthetic construct
  misc_feature 1..22: note = chemically synthesized
  source 1..22: mol_type = other DNA
gtagagatggggtttcaccaca

SEQ ID NO: 54473 - DNA, 22 bp, synthetic construct
  misc_feature 1..22: note = chemically synthesized
  source 1..22: mol_type = other DNA
caccacattggcctggctggtc

SEQ ID NO: 54474 - DNA, 22 bp, synthetic construct
  misc_feature 1..22: note = chemically synthesized
  source 1..22: mol_type = other DNA
accacattggcctggctggtct

SEQ ID NO: 54475 - DNA, 22 bp, synthetic construct
  misc_feature 1..22: note = chemically synthesized
  source 1..22: mol_type = other DNA
gcctggctggtctcaaactcct

SEQ ID NO: 54476 - DNA, 22 bp, synthetic construct
  misc_feature 1..22: note = chemically synthesized
  source 1..22: mol_type = other DNA
gctggtctcaaactcctgacct

SEQ ID NO: 54477 - DNA, 22 bp, synthetic construct
  misc_feature 1..22: note = chemically synthesized
  source 1..22: mol_type = other DNA
gtctcaaactcctgaccttgtg

SEQ ID NO: 54478 - DNA, 22 bp, synthetic construct
  misc_feature 1..22: note = chemically synthesized
  source 1..22: mol_type = other DNA
aaactcctgaccttgtgatcca

SEQ ID NO: 54479 - DNA, 22 bp, synthetic construct
  misc_feature 1..22: note = chemically synthesized
  source 1..22: mol_type = other DNA
ctgaccttgtgatccacctgtc

SEQ ID NO: 54480 - DNA, 22 bp, synthetic construct
  misc_feature 1..22: note = chemically synthesized
  source 1..22: mol_type = other DNA
accttgtgatccacctgtcttg

SEQ ID NO: 54481 - DNA, 22 bp, synthetic construct
  misc_feature 1..22: note = chemically synthesized
  source 1..22: mol_type = other DNA
gtgatccacctgtcttggcctc

SEQ ID NO: 54482 - DNA, 22 bp, synthetic construct
  misc_feature 1..22: note = chemically synthesized
  source 1..22: mol_type = other DNA
tgatccacctgtcttggcctcc

SEQ ID NO: 54483 - DNA, 22 bp, synthetic construct
  misc_feature 1..22: note = chemically synthesized
  source 1..22: mol_type = other DNA
tcttggcctcccaaagtgctgg

SEQ ID NO: 54484 - DNA, 22 bp, synthetic construct
  misc_feature 1..22: note = chemically synthesized
  source 1..22: mol_type = other DNA
ggcctcccaaagtgctgggatt

SEQ ID NO: 54485 - DNA, 22 bp, synthetic construct
  misc_feature 1..22: note = chemically synthesized
  source 1..22: mol_type = other DNA
gcctcccaaagtgctgggatta

SEQ ID NO: 54486 - DNA, 22 bp, synthetic construct
  misc_feature 1..22: note = chemically synthesized
  source 1..22: mol_type = other DNA
ccaaagtgctgggattacagag

SEQ ID NO: 54487 - DNA, 22 bp, synthetic construct
  misc_feature 1..22: note = chemically synthesized
  source 1..22: mol_type = other DNA
ggattacagagttgagccaccg

SEQ ID NO: 54488 - DNA, 22 bp, synthetic construct
  misc_feature 1..22: note = chemically synthesized
  source 1..22: mol_type = other DNA
cagagttgagccaccgcactcg

SEQ ID NO: 54489 - DNA, 22 bp, synthetic construct
  misc_feature 1..22: note = chemically synthesized
  source 1..22: mol_type = other DNA
agccaccgcactcgaccctatg

SEQ ID NO: 54490 - DNA, 22 bp, synthetic construct
  misc_feature 1..22: note = chemically synthesized
  source 1..22: mol_type = other DNA
gaccctatgttttatttttaaa

SEQ ID NO: 54491 - DNA, 22 bp, synthetic construct
  misc_feature 1..22: note = chemically synthesized
  source 1..22: mol_type = other DNA
tgttttatttttaaaaatattt

SEQ ID NO: 54492 - DNA, 22 bp, synthetic construct
  misc_feature 1..22: note = chemically synthesized
  source 1..22: mol_type = other DNA
tatttttaaaaatatttattta

SEQ ID NO: 54493 - DNA, 22 bp, synthetic construct
  misc_feature 1..22: note = chemically synthesized
  source 1..22: mol_type = other DNA
atttttaaaaatatttatttat

SEQ ID NO: 54494 - DNA, 22 bp, synthetic construct
  misc_feature 1..22: note = chemically synthesized
  source 1..22: mol_type = other DNA
tttttaaaaatatttatttatt

SEQ ID NO: 54495 - DNA, 22 bp, synthetic construct
  misc_feature 1..22: note = chemically synthesized
  source 1..22: mol_type = other DNA
ttaaaaatatttatttatttat

SEQ ID NO: 54496 - DNA, 22 bp, synthetic construct
  misc_feature 1..22: note = chemically synthesized
  source 1..22: mol_type = other DNA
taaaaatatttatttatttatt

SEQ ID NO: 54497 - DNA, 22 bp, synthetic construct
  misc_feature 1..22: note = chemically synthesized
  source 1..22: mol_type = other DNA
aaaaatatttatttatttattt

SEQ ID NO: 54498 - DNA, 22 bp, synthetic construct
  misc_feature 1..22: note = chemically synthesized
  source 1..22: mol_type = other DNA
aaaatatttatttatttattta

SEQ ID NO: 54499 - DNA, 22 bp, synthetic construct
  misc_feature 1..22: note = chemically synthesized
  source 1..22: mol_type = other DNA
atttatttatttaagccacaac

SEQ ID NO: 54500 - DNA, 22 bp, synthetic construct
  misc_feature 1..22: note = chemically synthesized
  source 1..22: mol_type = other DNA
tttatttatttaagccacaact

SEQ ID NO: 54501 - DNA, 22 bp, synthetic construct
  misc_feature 1..22: note = chemically synthesized
  source 1..22: mol_type = other DNA
atttatttaagccacaactact

SEQ ID NO: 54502 - DNA, 22 bp, synthetic construct
  misc_feature 1..22: note = chemically synthesized
  source 1..22: mol_type = other DNA
tttatttaagccacaactacta

SEQ ID NO: 54503 - DNA, 22 bp, synthetic construct
  misc_feature 1..22: note = chemically synthesized
  source 1..22: mol_type = other DNA
atttaagccacaactactagaa

SEQ ID NO: 54504 - DNA, 22 bp, synthetic construct
  misc_feature 1..22: note = chemically synthesized
  source 1..22: mol_type = other DNA
tttaagccacaactactagaat

SEQ ID NO: 54505 - DNA, 22 bp, synthetic construct
  misc_feature 1..22: note = chemically synthesized
  source 1..22: mol_type = other DNA
aagccacaactactagaatagg

SEQ ID NO: 54506 - DNA, 22 bp, synthetic construct
  misc_feature 1..22: note = chemically synthesized
  source 1..22: mol_type = other DNA
agccacaactactagaatagga

SEQ ID NO: 54507 - DNA, 22 bp, synthetic construct
  misc_feature 1..22: note = chemically synthesized
  source 1..22: mol_type = other DNA
ctagaataggaaggattgatat

SEQ ID NO: 54508 - DNA, 22 bp, synthetic construct
  misc_feature 1..22: note = chemically synthesized
  source 1..22: mol_type = other DNA
gaataggaaggattgatatttt

SEQ ID NO: 54509 - DNA, 22 bp, synthetic construct
  misc_feature 1..22: note = chemically synthesized
  source 1..22: mol_type = other DNA
atattttattaattttatttgg

SEQ ID NO: 54510 - DNA, 22 bp, synthetic construct
  misc_feature 1..22: note = chemically synthesized
  source 1..22: mol_type = other DNA
tattaattttatttggtattta

SEQ ID NO: 54511 - DNA, 22 bp, synthetic construct
  misc_feature 1..22: note = chemically synthesized
  source 1..22: mol_type = other DNA
attaattttatttggtatttat

SEQ ID NO: 54512 - DNA, 22 bp, synthetic construct
  misc_feature 1..22: note = chemically synthesized
  source 1..22: mol_type = other DNA
ttaattttatttggtatttatt

SEQ ID NO: 54513 - DNA, 22 bp, synthetic construct
  misc_feature 1..22: note = chemically synthesized
  source 1..22: mol_type = other DNA
attttatttggtatttattatt

SEQ ID NO: 54514 - DNA, 22 bp, synthetic construct
  misc_feature 1..22: note = chemically synthesized
  source 1..22: mol_type = other DNA
tatttggtatttattatttttt

SEQ ID NO: 54515 - DNA, 22 bp, synthetic construct
  misc_feature 1..22: note = chemically synthesized
  source 1..22: mol_type = other DNA
atttggtatttattattttttt

SEQ ID NO: 54516 - DNA, 22 bp, synthetic construct
  misc_feature 1..22: note = chemically synthesized
  source 1..22: mol_type = other DNA
tttggtatttattatttttttt

SEQ ID NO: 54517 - DNA, 22 bp, synthetic construct
  misc_feature 1..22: note = chemically synthesized
  source 1..22: mol_type = other DNA
ggtatttattatttttttttct

SEQ ID NO: 54518 - DNA, 22 bp, synthetic construct
  misc_feature 1..22: note = chemically synthesized
  source 1..22: mol_type = other DNA
gtatttattatttttttttctt

SEQ ID NO: 54519 - DNA, 22 bp, synthetic construct
  misc_feature 1..22: note = chemically synthesized
  source 1..22: mol_type = other DNA
attatttttttttctttcctga

SEQ ID NO: 54520 - DNA, 22 bp, synthetic construct
  misc_feature 1..22: note = chemically synthesized
  source 1..22: mol_type = other DNA
ttatttttttttctttcctgag

SEQ ID NO: 54521 - DNA, 22 bp, synthetic construct
  misc_feature 1..22: note = chemically synthesized
  source 1..22: mol_type = other DNA
tttttttttctttcctgagaca

SEQ ID NO: 54522 - DNA, 22 bp, synthetic construct
  misc_feature 1..22: note = chemically synthesized
  source 1..22: mol_type = other DNA
ttttttctttcctgagacattc

SEQ ID NO: 54523 - DNA, 22 bp, synthetic construct
  misc_feature 1..22: note = chemically synthesized
  source 1..22: mol_type = other DNA
tttttctttcctgagacattct

SEQ ID NO: 54524 - DNA, 22 bp, synthetic construct
  misc_feature 1..22: note = chemically synthesized
  source 1..22: mol_type = other DNA
ttttctttcctgagacattctt

SEQ ID NO: 54525 - DNA, 22 bp, synthetic construct
  misc_feature 1..22: note = chemically synthesized
  source 1..22: mol_type = other DNA
tttctttcctgagacattcttg

SEQ ID NO: 54526 - DNA, 22 bp, synthetic construct
  misc_feature 1..22: note = chemically synthesized
  source 1..22: mol_type = other DNA
ttctttcctgagacattcttgc

SEQ ID NO: 54527 - DNA, 22 bp, synthetic construct
  misc_feature 1..22: note = chemically synthesized
  source 1..22: mol_type = other DNA
tctttcctgagacattcttgct

SEQ ID NO: 54528 - DNA, 22 bp, synthetic construct
  misc_feature 1..22: note = chemically synthesized
  source 1..22: mol_type = other DNA
ctttcctgagacattcttgctc

SEQ ID NO: 54529 - DNA, 22 bp, synthetic construct
  misc_feature 1..22: note = chemically synthesized
  source 1..22: mol_type = other DNA
tttcctgagacattcttgctct

SEQ ID NO: 54530 - DNA, 22 bp, synthetic construct
  misc_feature 1..22: note = chemically synthesized
  source 1..22: mol_type = other DNA
tcctgagacattcttgctctgt

SEQ ID NO: 54531 - DNA, 22 bp, synthetic construct
  misc_feature 1..22: note = chemically synthesized
  source 1..22: mol_type = other DNA
cctgagacattcttgctctgtc

SEQ ID NO: 54532 - DNA, 22 bp, synthetic construct
  misc_feature 1..22: note = chemically synthesized
  source 1..22: mol_type = other DNA
ctgagacattcttgctctgtca

SEQ ID NO: 54533 - DNA, 22 bp, synthetic construct
  misc_feature 1..22: note = chemically synthesized
  source 1..22: mol_type = other DNA
agacattcttgctctgtcaccc

SEQ ID NO: 54534 - DNA, 22 bp, synthetic construct
  misc_feature 1..22: note = chemically synthesized
  source 1..22: mol_type = other DNA
ttgctctgtcacccaggctgga

SEQ ID NO: 54535 - DNA, 22 bp, synthetic construct
  misc_feature 1..22: note = chemically synthesized
  source 1..22: mol_type = other DNA
gctctgtcacccaggctggagt

SEQ ID NO: 54536 - DNA, 22 bp, synthetic construct
  misc_feature 1..22: note = chemically synthesized
  source 1..22: mol_type = other DNA
ctctgtcacccaggctggagtg

SEQ ID NO: 54537 - DNA, 22 bp, synthetic construct
  misc_feature 1..22: note = chemically synthesized
  source 1..22: mol_type = other DNA
tgtcacccaggctggagtgcag

SEQ ID NO: 54538 - DNA, 22 bp, synthetic construct
  misc_feature 1..22: note = chemically synthesized
  source 1..22: mol_type = other DNA
tcacccaggctggagtgcagtg

SEQ ID NO: 54539 - DNA, 22 bp, synthetic construct
  misc_feature 1..22: note = chemically synthesized
  source 1..22: mol_type = other DNA
gagtgcagtggcacattcttgg

SEQ ID NO: 54540 - DNA, 22 bp, synthetic construct
  misc_feature 1..22: note = chemically synthesized
  source 1..22: mol_type = other DNA
ttggctcactgcaacctccatc

SEQ ID NO: 54541 - DNA, 22 bp, synthetic construct
  misc_feature 1..22: note = chemically synthesized
  source 1..22: mol_type = other DNA
ggctcactgcaacctccatctc

SEQ ID NO: 54542 - DNA, 22 bp, synthetic construct
  misc_feature 1..22: note = chemically synthesized
  source 1..22: mol_type = other DNA
gctcactgcaacctccatctcc

SEQ ID NO: 54543 - DNA, 22 bp, synthetic construct
  misc_feature 1..22: note = chemically synthesized
  source 1..22: mol_type = other DNA
actgcaacctccatctcctgtg

SEQ ID NO: 54544 - DNA, 22 bp, synthetic construct
  misc_feature 1..22: note = chemically synthesized
  source 1..22: mol_type = other DNA
caacctccatctcctgtgttca

SEQ ID NO: 54545 - DNA, 22 bp, synthetic construct
  misc_feature 1..22: note = chemically synthesized
  source 1..22: mol_type = other DNA
catctcctgtgttcaagcaatt

SEQ ID NO: 54546 - DNA, 22 bp, synthetic construct
  misc_feature 1..22: note = chemically synthesized
  source 1..22: mol_type = other DNA
ctgtgttcaagcaattctagtg

SEQ ID NO: 54547 - DNA, 22 bp, synthetic construct
  misc_feature 1..22: note = chemically synthesized
  source 1..22: mol_type = other DNA
tgttcaagcaattctagtgcct

SEQ ID NO: 54548 - DNA, 22 bp, synthetic construct
  misc_feature 1..22: note = chemically synthesized
  source 1..22: mol_type = other DNA
aagcaattctagtgcctcagcc

SEQ ID NO: 54549 - DNA, 22 bp, synthetic construct
  misc_feature 1..22: note = chemically synthesized
  source 1..22: mol_type = other DNA
tagtgcctcagcctacttagta

SEQ ID NO: 54550 - DNA, 22 bp, synthetic construct
  misc_feature 1..22: note = chemically synthesized
  source 1..22: mol_type = other DNA
gtgcctcagcctacttagtagc

SEQ ID NO: 54551 - DNA, 22 bp, synthetic construct
  misc_feature 1..22: note = chemically synthesized
  source 1..22: mol_type = other DNA
agcctacttagtagctgggatg

SEQ ID NO: 54552 - DNA, 22 bp, synthetic construct
  misc_feature 1..22: note = chemically synthesized
  source 1..22: mol_type = other DNA
cttagtagctgggatgactggc

SEQ ID NO: 54553 - DNA, 22 bp, synthetic construct
  misc_feature 1..22: note = chemically synthesized
  source 1..22: mol_type = other DNA
agtagctgggatgactggcatg

SEQ ID NO: 54554 - DNA, 22 bp, synthetic construct
  misc_feature 1..22: note = chemically synthesized
  source 1..22: mol_type = other DNA
gtagctgggatgactggcatgt

SEQ ID NO: 54555 - DNA, 22 bp, synthetic construct
  misc_feature 1..22: note = chemically synthesized
  source 1..22: mol_type = other DNA
ggatgactggcatgtgcctcca

SEQ ID NO: 54556 - DNA, 22 bp, synthetic construct
  misc_feature 1..22: note = chemically synthesized
  source 1..22: mol_type = other DNA
gcatgtgcctccacacccagct

SEQ ID NO: 54557 - DNA, 22 bp, synthetic construct
  misc_feature 1..22: note = chemically synthesized
  source 1..22: mol_type = other DNA
cacacccagctaatttttgtat

SEQ ID NO: 54558 - DNA, 22 bp, synthetic construct
  misc_feature 1..22: note = chemically synthesized
  source 1..22: mol_type = other DNA
atttttgtattttttgtagaga

SEQ ID NO: 54559 - DNA, 22 bp, synthetic construct
  misc_feature 1..22: note = chemically synthesized
  source 1..22: mol_type = other DNA
ttgtattttttgtagagacagg

SEQ ID NO: 54560 - DNA, 22 bp, synthetic construct
  misc_feature 1..22: note = chemically synthesized
  source 1..22: mol_type = other DNA
tgtattttttgtagagacaggg

SEQ ID NO: 54561 - DNA, 22 bp, synthetic construct
  misc_feature 1..22: note = chemically synthesized
  source 1..22: mol_type = other DNA
gtattttttgtagagacagggt

SEQ ID NO: 54562 - DNA, 22 bp, synthetic construct
  misc_feature 1..22: note = chemically synthesized
  source 1..22: mol_type = other DNA
tattttttgtagagacagggtt

SEQ ID NO: 54563 - DNA, 22 bp, synthetic construct
  misc_feature 1..22: note = chemically synthesized
  source 1..22: mol_type = other DNA
tttgtagagacagggttttggc

SEQ ID NO: 54564 - DNA, 22 bp, synthetic construct
  misc_feature 1..22: note = chemically synthesized
  source 1..22: mol_type = other DNA
ttgtagagacagggttttggca

SEQ ID NO: 54565 - DNA, 22 bp, synthetic construct
  misc_feature 1..22: note = chemically synthesized
  source 1..22: mol_type = other DNA
tgtagagacagggttttggcat

SEQ ID NO: 54566 - DNA, 22 bp, synthetic construct
  misc_feature 1..22: note = chemically synthesized
  source 1..22: mol_type = other DNA
gtagagacagggttttggcatg

SEQ ID NO: 54567 - DNA, 22 bp, synthetic construct
  misc_feature 1..22: note = chemically synthesized
  source 1..22: mol_type = other DNA
tagagacagggttttggcatgt

SEQ ID NO: 54568 - DNA, 22 bp, synthetic construct
  misc_feature 1..22: note = chemically synthesized
  source 1..22: mol_type = other DNA
tggcatgttgcccaggcttgtc

SEQ ID NO: 54569 - DNA, 22 bp, synthetic construct
  misc_feature 1..22: note = chemically synthesized
  source 1..22: mol_type = other DNA
ggcatgttgcccaggcttgtct

SEQ ID NO: 54570 - DNA, 22 bp, synthetic construct
  misc_feature 1..22: note = chemically synthesized
  source 1..22: mol_type = other DNA
gcatgttgcccaggcttgtctc

SEQ ID NO: 54571 - DNA, 22 bp, synthetic construct
  misc_feature 1..22: note = chemically synthesized
  source 1..22: mol_type = other DNA
cccaggcttgtctcaaactcct

SEQ ID NO: 54572 - DNA, 22 bp, synthetic construct
  misc_feature 1..22: note = chemically synthesized
  source 1..22: mol_type = other DNA
gtctcaaactcctggcctcagg

SEQ ID NO: 54573 - DNA, 22 bp, synthetic construct
  misc_feature 1..22: note = chemically synthesized
  source 1..22: mol_type = other DNA
tctcaaactcctggcctcaggt

SEQ ID NO: 54574 - DNA, 22 bp, synthetic construct
  misc_feature 1..22: note = chemically synthesized
  source 1..22: mol_type = other DNA
aaactcctggcctcaggtgatc

SEQ ID NO: 54575 - DNA, 22 bp, synthetic construct
  misc_feature 1..22: note = chemically synthesized
  source 1..22: mol_type = other DNA
ctggcctcaggtgatccatctg

SEQ ID NO: 54576 - DNA, 22 bp, synthetic construct
  misc_feature 1..22: note = chemically synthesized
  source 1..22: mol_type = other DNA
gcctcaggtgatccatctgccg

SEQ ID NO: 54577 - DNA, 22 bp, synthetic construct
  misc_feature 1..22: note = chemically synthesized
  source 1..22: mol_type = other DNA
aggtgatccatctgccgtggcc

SEQ ID NO: 54578 - DNA, 22 bp, synthetic construct
  misc_feature 1..22: note = chemically synthesized
  source 1..22: mol_type = other DNA
ccgtggcctcccaaaatgctgg

SEQ ID NO: 54579 - DNA, 22 bp, synthetic construct
  misc_feature 1..22: note = chemically synthesized
  source 1..22: mol_type = other DNA
ccaaaatgctgggattataggc

SEQ ID NO: 54580 - DNA, 22 bp, synthetic construct
  misc_feature 1..22: note = chemically synthesized
  source 1..22: mol_type = other DNA
ggattataggcatgagccacca

SEQ ID NO: 54581 - DNA, 22 bp, synthetic construct
  misc_feature 1..22: note = chemically synthesized
  source 1..22: mol_type = other DNA
taggcatgagccaccaccccct

SEQ ID NO: 54582 - DNA, 22 bp, synthetic construct
  misc_feature 1..22: note = chemically synthesized
  source 1..22: mol_type = other DNA
ctggaaggattgatatcttata

SEQ ID NO: 54583 - DNA, 22 bp, synthetic construct
  misc_feature 1..22: note = chemically synthesized
  source 1..22: mol_type = other DNA
gaaggattgatatcttataaca

SEQ ID NO: 54584 - DNA, 22 bp, synthetic construct
  misc_feature 1..22: note = chemically synthesized
  source 1..22: mol_type = other DNA
atatcttataacataatttata

SEQ ID NO: 54585 - DNA, 22 bp, synthetic construct
  misc_feature 1..22: note = chemically synthesized
  source 1..22: mol_type = other DNA
ataacataatttataattacag

SEQ ID NO: 54586 - DNA, 22 bp, synthetic construct
  misc_feature 1..22: note = chemically synthesized
  source 1..22: mol_type = other DNA
taacataatttataattacaga

SEQ ID NO: 54587 - DNA, 22 bp, synthetic construct
  misc_feature 1..22: note = chemically synthesized
  source 1..22: mol_type = other DNA
ataattacagaaaacatgtgag

SEQ ID NO: 54588 - DNA, 22 bp, synthetic construct
  misc_feature 1..22: note = chemically synthesized
  source 1..22: mol_type = other DNA
taattacagaaaacatgtgagt

SEQ ID NO: 54589 - DNA, 22 bp, synthetic construct
  misc_feature 1..22: note = chemically synthesized
  source 1..22: mol_type = other DNA
cagaaaacatgtgagttcacta

SEQ ID NO: 54590 - DNA, 22 bp, synthetic construct
  misc_feature 1..22: note = chemically synthesized
  source 1..22: mol_type = other DNA
actaggaataaataaattttga

SEQ ID NO: 54591 - DNA, 22 bp, synthetic construct
  misc_feature 1..22: note = chemically synthesized
  source 1..22: mol_type = other DNA
ggaataaataaattttgaagat

SEQ ID NO: 54592 - DNA, 22 bp, synthetic construct
  misc_feature 1..22: note = chemically synthesized
  source 1..22: mol_type = other DNA
tgaagataataaaagattttca

SEQ ID NO: 54593 - DNA, 22 bp, synthetic construct
  misc_feature 1..22: note = chemically synthesized
  source 1..22: mol_type = other DNA
gaagataataaaagattttcac

SEQ ID NO: 54594 - DNA, 22 bp, synthetic construct
  misc_feature 1..22: note = chemically synthesized
  source 1..22: mol_type = other DNA
aagataataaaagattttcact

SEQ ID NO: 54595 - DNA, 22 bp, synthetic construct
  misc_feature 1..22: note = chemically synthesized
  source 1..22: mol_type = other DNA
tcacttatgttgtcatttcggc

SEQ ID NO: 54596 - DNA, 22 bp, synthetic construct
  misc_feature 1..22: note = chemically synthesized
  source 1..22: mol_type = other DNA
cacttatgttgtcatttcggca

SEQ ID NO: 54597 - DNA, 22 bp, synthetic construct
  misc_feature 1..22: note = chemically synthesized
  source 1..22: mol_type = other DNA
acttatgttgtcatttcggcac

SEQ ID NO: 54598 - DNA, 22 bp, synthetic construct
  misc_feature 1..22: note = chemically synthesized
  source 1..22: mol_type = other DNA
atgttgtcatttcggcacagtt

SEQ ID NO: 54599 - DNA, 22 bp, synthetic construct
  misc_feature 1..22: note = chemically synthesized
  source 1..22: mol_type = other DNA
tgttgtcatttcggcacagttt

SEQ ID NO: 54600 - DNA, 22 bp, synthetic construct
  misc_feature 1..22: note = chemically synthesized
  source 1..22: mol_type = other DNA
tcatttcggcacagtttggtat

SEQ ID NO: 54601 - DNA, 22 bp, synthetic construct
  misc_feature 1..22: note = chemically synthesized
  source 1..22: mol_type = other DNA
cggcacagtttggtataggatg

SEQ ID NO: 54602 - DNA, 22 bp, synthetic construct
  misc_feature 1..22: note = chemically synthesized
  source 1..22: mol_type = other DNA
ggcacagtttggtataggatgt

SEQ ID NO: 54603 - DNA, 22 bp, synthetic construct
  misc_feature 1..22: note = chemically synthesized
  source 1..22: mol_type = other DNA
ggtataggatgtggagatgtta

SEQ ID NO: 54604 - DNA, 22 bp, synthetic construct
  misc_feature 1..22: note = chemically synthesized
  source 1..22: mol_type = other DNA
gtataggatgtggagatgttaa

SEQ ID NO: 54605 - DNA, 22 bp, synthetic construct
  misc_feature 1..22: note = chemically synthesized
  source 1..22: mol_type = other DNA
acatttatacctagcttgctcg

SEQ ID NO: 54606 - DNA, 22 bp, synthetic construct
  misc_feature 1..22: note = chemically synthesized
  source 1..22: mol_type = other DNA
atacctagcttgctcgtaaact

SEQ ID NO: 54607 - DNA, 22 bp, synthetic construct
  misc_feature 1..22: note = chemically synthesized
  source 1..22: mol_type = other DNA
tacctagcttgctcgtaaacta

SEQ ID NO: 54608 - DNA, 22 bp, synthetic construct
  misc_feature 1..22: note = chemically synthesized
  source 1..22: mol_type = other DNA
gcttgctcgtaaactaagacct

SEQ ID NO: 54609 - DNA, 22 bp, synthetic construct
  misc_feature 1..22: note = chemically synthesized
  source 1..22: mol_type = other DNA
gctcgtaaactaagacctgaaa

SEQ ID NO: 54610 - DNA, 22 bp, synthetic construct
  misc_feature 1..22: note = chemically synthesized
  source 1..22: mol_type = other DNA
ctcgtaaactaagacctgaaag

SEQ ID NO: 54611 - DNA, 22 bp, synthetic construct
  misc_feature 1..22: note = chemically synthesized
  source 1..22: mol_type = other DNA
gtaaactaagacctgaaagggt

SEQ ID NO: 54612 - DNA, 22 bp, synthetic construct
  misc_feature 1..22: note = chemically synthesized
  source 1..22: mol_type = other DNA
agacctgaaagggttgtgtcta

SEQ ID NO: 54613 - DNA, 22 bp, synthetic construct
  misc_feature 1..22: note = chemically synthesized
  source 1..22: mol_type = other DNA
aaagggttgtgtctatcagctg

SEQ ID NO: 54614 - DNA, 22 bp, synthetic construct
  misc_feature 1..22: note = chemically synthesized
  source 1..22: mol_type = other DNA
tgtctatcagctgcacccctgg

SEQ ID NO: 54615 - DNA, 22 bp, synthetic construct
  misc_feature 1..22: note = chemically synthesized
  source 1..22: mol_type = other DNA
tcagctgcacccctgggtagcg

SEQ ID NO: 54616 - DNA, 22 bp, synthetic construct
  misc_feature 1..22: note = chemically synthesized
  source 1..22: mol_type = other DNA
cacccctgggtagcgacacaac

SEQ ID NO: 54617 - DNA, 22 bp, synthetic construct
  misc_feature 1..22: note = chemically synthesized
  source 1..22: mol_type = other DNA
ggtagcgacacaacctcgggaa

SEQ ID NO: 54618 - DNA, 22 bp, synthetic construct
  misc_feature 1..22: note = chemically synthesized
  source 1..22: mol_type = other DNA
gggaaggcctcagccccctcct

SEQ ID NO: 54619 - DNA, 22 bp, synthetic construct
  misc_feature 1..22: note = chemically synthesized
  source 1..22: mol_type = other DNA
agccccctcctcgtacagcact

SEQ ID NO: 54620 - DNA, 22 bp, synthetic construct
  misc_feature 1..22: note = chemically synthesized
  source 1..22: mol_type = other DNA
ctcgtacagcactgcctgttgg

SEQ ID NO: 54621 - DNA, 22 bp, synthetic construct
  misc_feature 1..22: note = chemically synthesized
  source 1..22: mol_type = other DNA
gtacagcactgcctgttggaaa

SEQ ID NO: 54622 - DNA, 22 bp, synthetic construct
  misc_feature 1..22: note = chemically synthesized
  source 1..22: mol_type = other DNA
cctgttggaaagcttgagggag

SEQ ID NO: 54623 - DNA, 22 bp, synthetic construct
  misc_feature 1..22: note = chemically synthesized
  source 1..22: mol_type = other DNA
ttggaaagcttgagggaggcta

SEQ ID NO: 54624 - DNA, 22 bp, synthetic construct
  misc_feature 1..22: note = chemically synthesized
  source 1..22: mol_type = other DNA
gaaagcttgagggaggctatgg

SEQ ID NO: 54625 - DNA, 22 bp, synthetic construct
  misc_feature 1..22: note = chemically synthesized
  source 1..22: mol_type = other DNA
gagggaggctatggatgtgcag

SEQ ID NO: 54626 - DNA, 22 bp, synthetic construct
  misc_feature 1..22: note = chemically synthesized
  source 1..22: mol_type = other DNA
agggaggctatggatgtgcagc

SEQ ID NO: 54627 - DNA, 22 bp, synthetic construct
  misc_feature 1..22: note = chemically synthesized
  source 1..22: mol_type = other DNA
tggatgtgcagcacttggcaga

SEQ ID NO: 54628 - DNA, 22 bp, synthetic construct
  misc_feature 1..22: note = chemically synthesized
  source 1..22: mol_type = other DNA
ggcagagggtctggtcatggaa

SEQ ID NO: 54629 - DNA, 22 bp, synthetic construct
  misc_feature 1..22: note = chemically synthesized
  source 1..22: mol_type = other DNA
gcagagggtctggtcatggaag

SEQ ID NO: 54630 - DNA, 22 bp, synthetic construct
  misc_feature 1..22: note = chemically synthesized
  source 1..22: mol_type = other DNA
gtcatggaagttaccagcaaat

SEQ ID NO: 54631 - DNA, 22 bp, synthetic construct
  misc_feature 1..22: note = chemically synthesized
  source 1..22: mol_type = other DNA
ccagcaaatatgagctactttt

SEQ ID NO: 54632 - DNA, 22 bp, synthetic construct
  misc_feature 1..22: note = chemically synthesized
  source 1..22: mol_type = other DNA
cttttatgattttattttatcc

SEQ ID NO: 54633 - DNA, 22 bp, synthetic construct
  misc_feature 1..22: note = chemically synthesized
  source 1..22: mol_type = other DNA
ttatgattttattttatccaaa

SEQ ID NO: 54634 - DNA, 22 bp, synthetic construct
  misc_feature 1..22: note = chemically synthesized
  source 1..22: mol_type = other DNA
tatgattttattttatccaaaa

SEQ ID NO: 54635 - DNA, 22 bp, synthetic construct
  misc_feature 1..22: note = chemically synthesized
  source 1..22: mol_type = other DNA
atgattttattttatccaaaag

SEQ ID NO: 54636 - DNA, 22 bp, synthetic construct
  misc_feature 1..22: note = chemically synthesized
  source 1..22: mol_type = other DNA
tgattttattttatccaaaaga

SEQ ID NO: 54637 - DNA, 22 bp, synthetic construct
  misc_feature 1..22: note = chemically synthesized
  source 1..22: mol_type = other DNA
tattttatccaaaagaaagaga

SEQ ID NO: 54638 - DNA, 22 bp, synthetic construct
  misc_feature 1..22: note = chemically synthesized
  source 1..22: mol_type = other DNA
attttatccaaaagaaagagaa

SEQ ID NO: 54639 - DNA, 22 bp, synthetic construct
  misc_feature 1..22: note = chemically synthesized
  source 1..22: mol_type = other DNA
ttttatccaaaagaaagagaat

SEQ ID NO: 54640 - DNA, 22 bp, synthetic construct
  misc_feature 1..22: note = chemically synthesized
  source 1..22: mol_type = other DNA
tatccaaaagaaagagaatgaa

SEQ ID NO: 54641 - DNA, 22 bp, synthetic construct
  misc_feature 1..22: note = chemically synthesized
  source 1..22: mol_type = other DNA
atccaaaagaaagagaatgaaa

SEQ ID NO: 54642 - DNA, 22 bp, synthetic construct
  misc_feature 1..22: note = chemically synthesized
  source 1..22: mol_type = other DNA
tccaaaagaaagagaatgaaag

SEQ ID NO: 54643 - DNA, 22 bp, synthetic construct
  misc_feature 1..22: note = chemically synthesized
  source 1..22: mol_type = other DNA
atcaggaaagatgaaggtctag

SEQ ID NO: 54644 - DNA, 22 bp, synthetic construct
  misc_feature 1..22: note = chemically synthesized
  source 1..22: mol_type = other DNA
ggggtgagggaaggagtaagga

SEQ ID NO: 54645 - DNA, 22 bp, synthetic construct
  misc_feature 1..22: note = chemically synthesized
  source 1..22: mol_type = other DNA
aggggggaaatggctttcacca

SEQ ID NO: 54646 - DNA, 22 bp, synthetic construct
  misc_feature 1..22: note = chemically synthesized
  source 1..22: mol_type = other DNA
tcaccacttcccagcatctatt

SEQ ID NO: 54647 - DNA, 22 bp, synthetic construct
  misc_feature 1..22: note = chemically synthesized
  source 1..22: mol_type = other DNA
caccacttcccagcatctattg

SEQ ID NO: 54648 - DNA, 22 bp, synthetic construct
  misc_feature 1..22: note = chemically synthesized
  source 1..22: mol_type = other DNA
accacttcccagcatctattga

SEQ ID NO: 54649 - DNA, 22 bp, synthetic construct
  misc_feature 1..22: note = chemically synthesized
  source 1..22: mol_type = other DNA
cccagcatctattgacattgca

SEQ ID NO: 54650 - DNA, 22 bp, synthetic construct
  misc_feature 1..22: note = chemically synthesized
  source 1..22: mol_type = other DNA
ccagcatctattgacattgcac

SEQ ID NO: 54651 - DNA, 22 bp, synthetic construct
  misc_feature 1..22: note = chemically synthesized
  source 1..22: mol_type = other DNA
ttgacattgcactctcaaatat

SEQ ID NO: 54652 - DNA, 22 bp, synthetic construct
  misc_feature 1..22: note = chemically synthesized
  source 1..22: mol_type = other DNA
acattgcactctcaaatatttt

SEQ ID NO: 54653 - DNA, 22 bp, synthetic construct
  misc_feature 1..22: note = chemically synthesized
  source 1..22: mol_type = other DNA
cactctcaaatattttataaga

SEQ ID NO: 54654 - DNA, 22 bp, synthetic construct
  misc_feature 1..22: note = chemically synthesized
  source 1..22: mol_type = other DNA
tcaaatattttataagactcta

SEQ ID NO: 54655 - DNA, 22 bp, synthetic construct
  misc_feature 1..22: note = chemically synthesized
  source 1..22: mol_type = other DNA
aaatattttataagactctata

SEQ ID NO: 54656 - DNA, 22 bp, synthetic construct
  misc_feature 1..22: note = chemically synthesized
  source 1..22: mol_type = other DNA
tataagactctatattcaaggt

SEQ ID NO: 54657 - DNA, 22 bp, synthetic construct
  misc_feature 1..22: note = chemically synthesized
  source 1..22: mol_type = other DNA
ataagactctatattcaaggta

SEQ ID NO: 54658 - DNA, 22 bp, synthetic construct
  misc_feature 1..22: note = chemically synthesized
  source 1..22: mol_type = other DNA
taagactctatattcaaggtaa

SEQ ID NO: 54659 - DNA, 22 bp, synthetic construct
  misc_feature 1..22: note = chemically synthesized
  source 1..22: mol_type = other DNA
tatattcaaggtaatgtttgaa

SEQ ID NO: 54660 - DNA, 22 bp, synthetic construct
  misc_feature 1..22: note = chemically synthesized
  source 1..22: mol_type = other DNA
tattcaaggtaatgtttgaacc

SEQ ID NO: 54661 - DNA, 22 bp, synthetic construct
  misc_feature 1..22: note = chemically synthesized
  source 1..22: mol_type = other DNA
aaggtaatgtttgaaccctgct

SEQ ID NO: 54662 - DNA, 22 bp, synthetic construct
  misc_feature 1..22: note = chemically synthesized
  source 1..22: mol_type = other DNA
gaaccctgctgagccagtggca

SEQ ID NO: 54663 - DNA, 22 bp, synthetic construct
  misc_feature 1..22: note = chemically synthesized
  source 1..22: mol_type = other DNA
aaccctgctgagccagtggcat

SEQ ID NO: 54664 - DNA, 22 bp, synthetic construct
  misc_feature 1..22: note = chemically synthesized
  source 1..22: mol_type = other DNA
ctgagccagtggcatgggtctc

SEQ ID NO: 54665 - DNA, 22 bp, synthetic construct
  misc_feature 1..22: note = chemically synthesized
  source 1..22: mol_type = other DNA
agccagtggcatgggtctctga

SEQ ID NO: 54666 - DNA, 22 bp, synthetic construct
  misc_feature 1..22: note = chemically synthesized
  source 1..22: mol_type = other DNA
tgagagaatcattaacttaatt

SEQ ID NO: 54667 - DNA, 22 bp, synthetic construct
  misc_feature 1..22: note = chemically synthesized
  source 1..22: mol_type = other DNA
agagaatcattaacttaatttg

SEQ ID NO: 54668 - DNA, 22 bp, synthetic construct
  misc_feature 1..22: note = chemically synthesized
  source 1..22: mol_type = other DNA
acttaatttgactatctggttt

SEQ ID NO: 54669 - DNA, 22 bp, synthetic construct
  misc_feature 1..22: note = chemically synthesized
  source 1..22: mol_type = other DNA
aatttgactatctggtttgtgg

SEQ ID NO: 54670 - DNA, 22 bp, synthetic construct
  misc_feature 1..22: note = chemically synthesized
  source 1..22: mol_type = other DNA
atttgactatctggtttgtggg

SEQ ID NO: 54671 - DNA, 22 bp, synthetic construct
  misc_feature 1..22: note = chemically synthesized
  source 1..22: mol_type = other DNA
gactatctggtttgtgggtgcg

SEQ ID NO: 54672 - DNA, 22 bp, synthetic construct
  misc_feature 1..22: note = chemically synthesized
  source 1..22: mol_type = other DNA
actatctggtttgtgggtgcgt

SEQ ID NO: 54673 - DNA, 22 bp, synthetic construct
  misc_feature 1..22: note = chemically synthesized
  source 1..22: mol_type = other DNA
tctggtttgtgggtgcgtttac

SEQ ID NO: 54674 - DNA, 22 bp, synthetic construct
  misc_feature 1..22: note = chemically synthesized
  source 1..22: mol_type = other DNA
gtttgtgggtgcgtttactctc

SEQ ID NO: 54675 - DNA, 22 bp, synthetic construct
  misc_feature 1..22: note = chemically synthesized
  source 1..22: mol_type = other DNA
gtgggtgcgtttactctcatgt

SEQ ID NO: 54676 - DNA, 22 bp, synthetic construct
  misc_feature 1..22: note = chemically synthesized
  source 1..22: mol_type = other DNA
tgggtgcgtttactctcatgta

SEQ ID NO: 54677 - DNA, 22 bp, synthetic construct
  misc_feature 1..22: note = chemically synthesized
  source 1..22: mol_type = other DNA
actctcatgtaagtcaacaatg

SEQ ID NO: 54678 - DNA, 22 bp, synthetic construct
  misc_feature 1..22: note = chemically synthesized
  source 1..22: mol_type = other DNA
ctctcatgtaagtcaacaatgt

SEQ ID NO: 54679 - DNA, 22 bp, synthetic construct
  misc_feature 1..22: note = chemically synthesized
  source 1..22: mol_type = other DNA
tcatgtaagtcaacaatgtcct

SEQ ID NO: 54680 - DNA, 22 bp, synthetic construct
  misc_feature 1..22: note = chemically synthesized
  source 1..22: mol_type = other DNA
atgtaagtcaacaatgtcctgg

SEQ ID NO: 54681 - DNA, 22 bp, synthetic construct
  misc_feature 1..22: note = chemically synthesized
  source 1..22: mol_type = other DNA
ggattgggacacactttctggg

SEQ ID NO: 54682 - DNA, 22 bp, synthetic construct
  misc_feature 1..22: note = chemically synthesized
  source 1..22: mol_type = other DNA
ggacacactttctgggcactgc

SEQ ID NO: 54683 - DNA, 22 bp, synthetic construct
  misc_feature 1..22: note = chemically synthesized
  source 1..22: mol_type = other DNA
tctgggcactgctggccagtcc

SEQ ID NO: 54684 - DNA, 22 bp, synthetic construct
  misc_feature 1..22: note = chemically synthesized
  source 1..22: mol_type = other DNA
ctgggcactgctggccagtccc

SEQ ID NO: 54685 - DNA, 22 bp, synthetic construct
  misc_feature 1..22: note = chemically synthesized
  source 1..22: mol_type = other DNA
tgggcactgctggccagtccca

SEQ ID NO: 54686 - DNA, 22 bp, synthetic construct
  misc_feature 1..22: note = chemically synthesized
  source 1..22: mol_type = other DNA
ggcactgctggccagtcccaaa

SEQ ID NO: 54687 - DNA, 22 bp, synthetic construct
  misc_feature 1..22: note = chemically synthesized
  source 1..22: mol_type = other DNA
ctggccagtcccaaaatggaac

SEQ ID NO: 54688 - DNA, 22 bp, synthetic construct
  misc_feature 1..22: note = chemically synthesized
  source 1..22: mol_type = other DNA
gccagtcccaaaatggaacata

SEQ ID NO: 54689 - DNA, 22 bp, synthetic construct
  misc_feature 1..22: note = chemically synthesized
  source 1..22: mol_type = other DNA
ttctacttcttttatttctgaa

SEQ ID NO: 54690 - DNA, 22 bp, synthetic construct
  misc_feature 1..22: note = chemically synthesized
  source 1..22: mol_type = other DNA
ctacttcttttatttctgaaat

SEQ ID NO: 54691 - DNA, 22 bp, synthetic construct
  misc_feature 1..22: note = chemically synthesized
  source 1..22: mol_type = other DNA
tacttcttttatttctgaaatc

SEQ ID NO: 54692 - DNA, 22 bp, synthetic construct
  misc_feature 1..22: note = chemically synthesized
  source 1..22: mol_type = other DNA
cttcttttatttctgaaatcag

SEQ ID NO: 54693 - DNA, 22 bp, synthetic construct
  misc_feature 1..22: note = chemically synthesized
  source 1..22: mol_type = other DNA
cttttatttctgaaatcaggta

SEQ ID NO: 54694 - DNA, 22 bp, synthetic construct
  misc_feature 1..22: note = chemically synthesized
  source 1..22: mol_type = other DNA
ttttatttctgaaatcaggtaa

SEQ ID NO: 54695 - DNA, 22 bp, synthetic construct
  misc_feature 1..22: note = chemically synthesized
  source 1..22: mol_type = other DNA
ttatttctgaaatcaggtaaga

SEQ ID NO: 54696 - DNA, 22 bp, synthetic construct
  misc_feature 1..22: note = chemically synthesized
  source 1..22: mol_type = other DNA
tatttctgaaatcaggtaagac

SEQ ID NO: 54697 - DNA, 22 bp, synthetic construct
  misc_feature 1..22: note = chemically synthesized
  source 1..22: mol_type = other DNA
atttctgaaatcaggtaagaca

SEQ ID NO: 54698 - DNA, 22 bp, synthetic construct
  misc_feature 1..22: note = chemically synthesized
  source 1..22: mol_type = other DNA
tttctgaaatcaggtaagacat

SEQ ID NO: 54699 - DNA, 22 bp, synthetic construct
  misc_feature 1..22: note = chemically synthesized
  source 1..22: mol_type = other DNA
ctgaaatcaggtaagacatagt

SEQ ID NO: 54700 - DNA, 22 bp, synthetic construct
  misc_feature 1..22: note = chemically synthesized
  source 1..22: mol_type = other DNA
tgaaatcaggtaagacatagtt

SEQ ID NO: 54701 - DNA, 22 bp, synthetic construct
  misc_feature 1..22: note = chemically synthesized
  source 1..22: mol_type = other DNA
aaatcaggtaagacatagtttt

SEQ ID NO: 54702 - DNA, 22 bp, synthetic construct
  misc_feature 1..22: note = chemically synthesized
  source 1..22: mol_type = other DNA
ttttaaattataagaattattt

SEQ ID NO: 54703 - DNA, 22 bp, synthetic construct
  misc_feature 1..22: note = chemically synthesized
  source 1..22: mol_type = other DNA
tttaaattataagaattatttt

SEQ ID NO: 54704 - DNA, 22 bp, synthetic construct
  misc_feature 1..22: note = chemically synthesized
  source 1..22: mol_type = other DNA
ttaaattataagaattattttt

SEQ ID NO: 54705 - DNA, 22 bp, synthetic construct
  misc_feature 1..22: note = chemically synthesized
  source 1..22: mol_type = other DNA
taaattataagaattatttttt

SEQ ID NO: 54706 - DNA, 22 bp, synthetic construct
  misc_feature 1..22: note = chemically synthesized
  source 1..22: mol_type = other DNA
aaattataagaattattttttc

SEQ ID NO: 54707 - DNA, 22 bp, synthetic construct
  misc_feature 1..22: note = chemically synthesized
  source 1..22: mol_type = other DNA
aattataagaattattttttct

SEQ ID NO: 54708 - DNA, 22 bp, synthetic construct
  misc_feature 1..22: note = chemically synthesized
  source 1..22: mol_type = other DNA
taagaattattttttctcccac

SEQ ID NO: 54709 - DNA, 22 bp, synthetic construct
  misc_feature 1..22: note = chemically synthesized
  source 1..22: mol_type = other DNA
ttttttctcccacaatgtagta

SEQ ID NO: 54710 - DNA, 22 bp, synthetic construct
  misc_feature 1..22: note = chemically synthesized
  source 1..22: mol_type = other DNA
tttctcccacaatgtagtaaaa

SEQ ID NO: 54711 - DNA, 22 bp, synthetic construct
  misc_feature 1..22: note = chemically synthesized
  source 1..22: mol_type = other DNA
ttctcccacaatgtagtaaaaa

SEQ ID NO: 54712 - DNA, 22 bp, synthetic construct
  misc_feature 1..22: note = chemically synthesized
  source 1..22: mol_type = other DNA
tctcccacaatgtagtaaaaat

SEQ ID NO: 54713 - DNA, 22 bp, synthetic construct
  misc_feature 1..22: note = chemically synthesized
  source 1..22: mol_type = other DNA
ctcccacaatgtagtaaaaata

SEQ ID NO: 54714 - DNA, 22 bp, synthetic construct
  misc_feature 1..22: note = chemically synthesized
  source 1..22: mol_type = other DNA
tcccacaatgtagtaaaaatac

SEQ ID NO: 54715 - DNA, 22 bp, synthetic construct
  misc_feature 1..22: note = chemically synthesized
  source 1..22: mol_type = other DNA
ccacaatgtagtaaaaatacat

SEQ ID NO: 54716 - DNA, 22 bp, synthetic construct
  misc_feature 1..22: note = chemically synthesized
  source 1..22: mol_type = other DNA
tatgtgcaattcatttaatttt

SEQ ID NO: 54717 - DNA, 22 bp, synthetic construct
  misc_feature 1..22: note = chemically synthesized
  source 1..22: mol_type = other DNA
atgtgcaattcatttaattttt

SEQ ID NO: 54718 - DNA, 22 bp, synthetic construct
  misc_feature 1..22: note = chemically synthesized
  source 1..22: mol_type = other DNA
tgtgcaattcatttaatttttg

SEQ ID NO: 54719 - DNA, 22 bp, synthetic construct
  misc_feature 1..22: note = chemically synthesized
  source 1..22: mol_type = other DNA
atttaatttttgattcatgaaa

SEQ ID NO: 54720 - DNA, 22 bp, synthetic construct
  misc_feature 1..22: note = chemically synthesized
  source 1..22: mol_type = other DNA
aatttttgattcatgaaattcc

SEQ ID NO: 54721 - DNA, 22 bp, synthetic construct
  misc_feature 1..22: note = chemically synthesized
  source 1..22: mol_type = other DNA
atttttgattcatgaaattccc

SEQ ID NO: 54722 - DNA, 22 bp, synthetic construct
  misc_feature 1..22: note = chemically synthesized
  source 1..22: mol_type = other DNA
ttgattcatgaaattcccagtt

SEQ ID NO: 54723 - DNA, 22 bp, synthetic construct
  misc_feature 1..22: note = chemically synthesized
  source 1..22: mol_type = other DNA
tgattcatgaaattcccagttc

SEQ ID NO: 54724 - DNA, 22 bp, synthetic construct
  misc_feature 1..22: note = chemically synthesized
  source 1..22: mol_type = other DNA
gattcatgaaattcccagttca

SEQ ID NO: 54725 - DNA, 22 bp, synthetic construct
  misc_feature 1..22: note = chemically synthesized
  source 1..22: mol_type = other DNA
attcatgaaattcccagttcaa

SEQ ID NO: 54726 - DNA, 22 bp, synthetic construct
  misc_feature 1..22: note = chemically synthesized
  source 1..22: mol_type = other DNA
atgaaattcccagttcaaaatc

SEQ ID NO: 54727 - DNA, 22 bp, synthetic construct
  misc_feature 1..22: note = chemically synthesized
  source 1..22: mol_type = other DNA
ccagttcaaaatcttgtatatg

SEQ ID NO: 54728 - DNA, 22 bp, synthetic construct
  misc_feature 1..22: note = chemically synthesized
  source 1..22: mol_type = other DNA
aaaatcttgtatatgattgaaa

SEQ ID NO: 54729 - DNA, 22 bp, synthetic construct
  misc_feature 1..22: note = chemically synthesized
  source 1..22: mol_type = other DNA
gtatatgattgaaaaattctta

SEQ ID NO: 54730 - DNA, 22 bp, synthetic construct
  misc_feature 1..22: note = chemically synthesized
  source 1..22: mol_type = other DNA
tatatgattgaaaaattcttaa

SEQ ID NO: 54731 - DNA, 22 bp, synthetic construct
  misc_feature 1..22: note = chemically synthesized
  source 1..22: mol_type = other DNA
aaaaattcttaaaaaaataagt

SEQ ID NO: 54732 - DNA, 22 bp, synthetic construct
  misc_feature 1..22: note = chemically synthesized
  source 1..22: mol_type = other DNA
ttaaaaaaataagtttaatttc

SEQ ID NO: 54733 - DNA, 22 bp, synthetic construct
  misc_feature 1..22: note = chemically synthesized
  source 1..22: mol_type = other DNA
aaaaaaataagtttaatttccc

SEQ ID NO: 54734 - DNA, 22 bp, synthetic construct
  misc_feature 1..22: note = chemically synthesized
  source 1..22: mol_type = other DNA
aaaaaataagtttaatttcccc

SEQ ID NO: 54735 - DNA, 22 bp, synthetic construct
  misc_feature 1..22: note = chemically synthesized
  source 1..22: mol_type = other DNA
aatttccccgtgaagactgtca

SEQ ID NO: 54736 - DNA, 22 bp, synthetic construct
  misc_feature 1..22: note = chemically synthesized
  source 1..22: mol_type = other DNA
atttccccgtgaagactgtcac

SEQ ID NO: 54737 - DNA, 22 bp, synthetic construct
  misc_feature 1..22: note = chemically synthesized
  source 1..22: mol_type = other DNA
ccccgtgaagactgtcacggtg

SEQ ID NO: 54738 - DNA, 22 bp, synthetic construct
  misc_feature 1..22: note = chemically synthesized
  source 1..22: mol_type = other DNA
cccgtgaagactgtcacggtgc

SEQ ID NO: 54739 - DNA, 22 bp, synthetic construct
  misc_feature 1..22: note = chemically synthesized
  source 1..22: mol_type = other DNA
tcacggtgctggaatgaatggg

SEQ ID NO: 54740 - DNA, 22 bp, synthetic construct
  misc_feature 1..22: note = chemically synthesized
  source 1..22: mol_type = other DNA
gaatgaatgggcagaaaaaata

SEQ ID NO: 54741 - DNA, 22 bp, synthetic construct
  misc_feature 1..22: note = chemically synthesized
  source 1..22: mol_type = other DNA
atttttctaatctaaaagagtg

SEQ ID NO: 54742 - DNA, 22 bp, synthetic construct
  misc_feature 1..22: note = chemically synthesized
  source 1..22: mol_type = other DNA
ttctaatctaaaagagtgtgcc

SEQ ID NO: 54743 - DNA, 22 bp, synthetic construct
  misc_feature 1..22: note = chemically synthesized
  source 1..22: mol_type = other DNA
tctaatctaaaagagtgtgcct

SEQ ID NO: 54744 - DNA, 22 bp, synthetic construct
  misc_feature 1..22: note = chemically synthesized
  source 1..22: mol_type = other DNA
ctaatctaaaagagtgtgccta

SEQ ID NO: 54745 - DNA, 22 bp, synthetic construct
  misc_feature 1..22: note = chemically synthesized
  source 1..22: mol_type = other DNA
taatctaaaagagtgtgcctac

SEQ ID NO: 54746 - DNA, 22 bp, synthetic construct
  misc_feature 1..22: note = chemically synthesized
  source 1..22: mol_type = other DNA
atctaaaagagtgtgcctacat

SEQ ID NO: 54747 - DNA, 22 bp, synthetic construct
  misc_feature 1..22: note = chemically synthesized
  source 1..22: mol_type = other DNA
aaagagtgtgcctacatgatgg

SEQ ID NO: 54748 - DNA, 22 bp, synthetic construct
  misc_feature 1..22: note = chemically synthesized
  source 1..22: mol_type = other DNA
catgatggccagtctggctgaa

SEQ ID NO: 54749 - DNA, 22 bp, synthetic construct
  misc_feature 1..22: note = chemically synthesized
  source 1..22: mol_type = other DNA
gctgaaaaataaatagccattg

SEQ ID NO: 54750 - DNA, 22 bp, synthetic construct
  misc_feature 1..22: note = chemically synthesized
  source 1..22: mol_type = other DNA
aaaaataaatagccattgtagc

SEQ ID NO: 54751 - DNA, 22 bp, synthetic construct
  misc_feature 1..22: note = chemically synthesized
  source 1..22: mol_type = other DNA
tagctaactatgcaaaggatgg

SEQ ID NO: 54752 - DNA, 22 bp, synthetic construct
  misc_feature 1..22: note = chemically synthesized
  source 1..22: mol_type = other DNA
actatgcaaaggatggctaagc

SEQ ID NO: 54753 - DNA, 22 bp, synthetic construct
  misc_feature 1..22: note = chemically synthesized
  source 1..22: mol_type = other DNA
tgcaaaggatggctaagctctt

SEQ ID NO: 54754 - DNA, 22 bp, synthetic construct
  misc_feature 1..22: note = chemically synthesized
  source 1..22: mol_type = other DNA
agctcttcgcttggttctcagt

SEQ ID NO: 54755 - DNA, 22 bp, synthetic construct
  misc_feature 1..22: note = chemically synthesized
  source 1..22: mol_type = other DNA
ttcgcttggttctcagtttcat

SEQ ID NO: 54756 - DNA, 22 bp, synthetic construct
  misc_feature 1..22: note = chemically synthesized
  source 1..22: mol_type = other DNA
cgcttggttctcagtttcatta

SEQ ID NO: 54757 - DNA, 22 bp, synthetic construct
  misc_feature 1..22: note = chemically synthesized
  source 1..22: mol_type = other DNA
gcttggttctcagtttcattaa

SEQ ID NO: 54758 - DNA, 22 bp, synthetic construct
  misc_feature 1..22: note = chemically synthesized
  source 1..22: mol_type = other DNA
ggttctcagtttcattaattta

SEQ ID NO: 54759 - DNA, 22 bp, synthetic construct
  misc_feature 1..22: note = chemically synthesized
  source 1..22: mol_type = other DNA
gttctcagtttcattaatttat

SEQ ID NO: 54760 - DNA, 22 bp, synthetic construct
  misc_feature 1..22: note = chemically synthesized
  source 1..22: mol_type = other DNA
tcagtttcattaatttatatca

SEQ ID NO: 54761 - DNA, 22 bp, synthetic construct
  misc_feature 1..22: note = chemically synthesized
  source 1..22: mol_type = other DNA
agtttcattaatttatatcatc

SEQ ID NO: 54762 - DNA, 22 bp, synthetic construct
  misc_feature 1..22: note = chemically synthesized
  source 1..22: mol_type = other DNA
cattaatttatatcatctctgt

SEQ ID NO: 54763 - DNA, 22 bp, synthetic construct
  misc_feature 1..22: note = chemically synthesized
  source 1..22: mol_type = other DNA
attaatttatatcatctctgtt

SEQ ID NO: 54764 - DNA, 22 bp, synthetic construct
  misc_feature 1..22: note = chemically synthesized
  source 1..22: mol_type = other DNA
atttatatcatctctgttcagg

SEQ ID NO: 54765 - DNA, 22 bp, synthetic construct
  misc_feature 1..22: note = chemically synthesized
  source 1..22: mol_type = other DNA
atatcatctctgttcaggtgcc

SEQ ID NO: 54766 - DNA, 22 bp, synthetic construct
  misc_feature 1..22: note = chemically synthesized
  source 1..22: mol_type = other DNA
tatcatctctgttcaggtgcca

SEQ ID NO: 54767 - DNA, 22 bp, synthetic construct
  misc_feature 1..22: note = chemically synthesized
  source 1..22: mol_type = other DNA
tgttcaggtgccatgctcccct

SEQ ID NO: 54768 - DNA, 22 bp, synthetic construct
  misc_feature 1..22: note = chemically synthesized
  source 1..22: mol_type = other DNA
ttcaggtgccatgctcccctca

SEQ ID NO: 54769 - DNA, 22 bp, synthetic construct
  misc_feature 1..22: note = chemically synthesized
  source 1..22: mol_type = other DNA
aggtgccatgctcccctcacta

SEQ ID NO: 54770 - DNA, 22 bp, synthetic construct
  misc_feature 1..22: note = chemically synthesized
  source 1..22: mol_type = other DNA
ccctcactagcaagttgaaaca

SEQ ID NO: 54771 - DNA, 22 bp, synthetic construct
  misc_feature 1..22: note = chemically synthesized
  source 1..22: mol_type = other DNA
actagcaagttgaaacaatgaa

SEQ ID NO: 54772 - DNA, 22 bp, synthetic construct
  misc_feature 1..22: note = chemically synthesized
  source 1..22: mol_type = other DNA
gcaagttgaaacaatgaaataa

SEQ ID NO: 54773 - DNA, 22 bp, synthetic construct
  misc_feature 1..22: note = chemically synthesized
  source 1..22: mol_type = other DNA
aaacaatgaaataactctttga

SEQ ID NO: 54774 - DNA, 22 bp, synthetic construct
  misc_feature 1..22: note = chemically synthesized
  source 1..22: mol_type = other DNA
tttgaatatgtttggttccttg

SEQ ID NO: 54775 - DNA, 22 bp, synthetic construct
  misc_feature 1..22: note = chemically synthesized
  source 1..22: mol_type = other DNA
tgaatatgtttggttccttgac

SEQ ID NO: 54776 - DNA, 22 bp, synthetic construct
  misc_feature 1..22: note = chemically synthesized
  source 1..22: mol_type = other DNA
gaatatgtttggttccttgacc

SEQ ID NO: 54777 - DNA, 22 bp, synthetic construct
  misc_feature 1..22: note = chemically synthesized
  source 1..22: mol_type = other DNA
aatatgtttggttccttgacct

SEQ ID NO: 54778 - DNA, 22 bp, synthetic construct
  misc_feature 1..22: note = chemically synthesized
  source 1..22: mol_type = other DNA
ggttccttgacctgttcatgga

SEQ ID NO: 54779 - DNA, 22 bp, synthetic construct
  misc_feature 1..22: note = chemically synthesized
  source 1..22: mol_type = other DNA
gttccttgacctgttcatggag

SEQ ID NO: 54780 - DNA, 22 bp, synthetic construct
  misc_feature 1..22: note = chemically synthesized
  source 1..22: mol_type = other DNA
cttgacctgttcatggagtggg

SEQ ID NO: 54781 - DNA, 22 bp, synthetic construct
  misc_feature 1..22: note = chemically synthesized
  source 1..22: mol_type = other DNA
gacctgttcatggagtgggact

SEQ ID NO: 54782 - DNA, 22 bp, synthetic construct
  misc_feature 1..22: note = chemically synthesized
  source 1..22: mol_type = other DNA
acctgttcatggagtgggactc

SEQ ID NO: 54783 - DNA, 22 bp, synthetic construct
  misc_feature 1..22: note = chemically synthesized
  source 1..22: mol_type = other DNA
ttcatggagtgggactcagcat

SEQ ID NO: 54784 - DNA, 22 bp, synthetic construct
  misc_feature 1..22: note = chemically synthesized
  source 1..22: mol_type = other DNA
atggagtgggactcagcatttc

SEQ ID NO: 54785 - DNA, 22 bp, synthetic construct
  misc_feature 1..22: note = chemically synthesized
  source 1..22: mol_type = other DNA
agcatttctctctttgttatgg

SEQ ID NO: 54786 - DNA, 22 bp, synthetic construct
  misc_feature 1..22: note = chemically synthesized
  source 1..22: mol_type = other DNA
ctctctttgttatggcctgagt

SEQ ID NO: 54787 - DNA, 22 bp, synthetic construct
  misc_feature 1..22: note = chemically synthesized
  source 1..22: mol_type = other DNA
tctctttgttatggcctgagta

SEQ ID NO: 54788 - DNA, 22 bp, synthetic construct
  misc_feature 1..22: note = chemically synthesized
  source 1..22: mol_type = other DNA
tctttgttatggcctgagtaag

SEQ ID NO: 54789 - DNA, 22 bp, synthetic construct
  misc_feature 1..22: note = chemically synthesized
  source 1..22: mol_type = other DNA
tttgttatggcctgagtaaggc

SEQ ID NO: 54790 - DNA, 22 bp, synthetic construct
  misc_feature 1..22: note = chemically synthesized
  source 1..22: mol_type = other DNA
tgttatggcctgagtaaggctt

SEQ ID NO: 54791 - DNA, 22 bp, synthetic construct
  misc_feature 1..22: note = chemically synthesized
  source 1..22: mol_type = other DNA
gttatggcctgagtaaggcttt

SEQ ID NO: 54792 - DNA, 22 bp, synthetic construct
  misc_feature 1..22: note = chemically synthesized
  source 1..22: mol_type = other DNA
ttatggcctgagtaaggctttc

SEQ ID NO: 54793 - DNA, 22 bp, synthetic construct
  misc_feature 1..22: note = chemically synthesized
  source 1..22: mol_type = other DNA
tggcctgagtaaggctttccat

SEQ ID NO: 54794 - DNA, 22 bp, synthetic construct
  misc_feature 1..22: note = chemically synthesized
  source 1..22: mol_type = other DNA
agtaaggctttccatcggtata

SEQ ID NO: 54795 - DNA, 22 bp, synthetic construct
  misc_feature 1..22: note = chemically synthesized
  source 1..22: mol_type = other DNA
tccatcggtatacatttgcttc

SEQ ID NO: 54796 - DNA, 22 bp, synthetic construct
  misc_feature 1..22: note = chemically synthesized
  source 1..22: mol_type = other DNA
ccatcggtatacatttgcttct

SEQ ID NO: 54797 - DNA, 22 bp, synthetic construct
  misc_feature 1..22: note = chemically synthesized
  source 1..22: mol_type = other DNA
catcggtatacatttgcttctt

SEQ ID NO: 54798 - DNA, 22 bp, synthetic construct
  misc_feature 1..22: note = chemically synthesized
  source 1..22: mol_type = other DNA
gcttcttatccctggagaaatt

SEQ ID NO: 54799 - DNA, 22 bp, synthetic construct
  misc_feature 1..22: note = chemically synthesized
  source 1..22: mol_type = other DNA
cttcttatccctggagaaatta

SEQ ID NO: 54800 - DNA, 22 bp, synthetic construct
  misc_feature 1..22: note = chemically synthesized
  source 1..22: mol_type = other DNA
cttatccctggagaaattatac

SEQ ID NO: 54801 - DNA, 22 bp, synthetic construct
  misc_feature 1..22: note = chemically synthesized
  source 1..22: mol_type = other DNA
ttatccctggagaaattataca

SEQ ID NO: 54802 - DNA, 22 bp, synthetic construct
  misc_feature 1..22: note = chemically synthesized
  source 1..22: mol_type = other DNA
atccctggagaaattatacaca

SEQ ID NO: 54803 - DNA, 22 bp, synthetic construct
  misc_feature 1..22: note = chemically synthesized
  source 1..22: mol_type = other DNA
tccctggagaaattatacacat

SEQ ID NO: 54804 - DNA, 22 bp, synthetic construct
  misc_feature 1..22: note = chemically synthesized
  source 1..22: mol_type = other DNA
gagaaattatacacatccattt

SEQ ID NO: 54805 - DNA, 22 bp, synthetic construct
  misc_feature 1..22: note = chemically synthesized
  source 1..22: mol_type = other DNA
tacacatccatttgccagatga

SEQ ID NO: 54806 - DNA, 22 bp, synthetic construct
  misc_feature 1..22: note = chemically synthesized
  source 1..22: mol_type = other DNA
gccagatgatatacgcatataa

SEQ ID NO: 54807 - DNA, 22 bp, synthetic construct
  misc_feature 1..22: note = chemically synthesized
  source 1..22: mol_type = other DNA
ccagatgatatacgcatataat

SEQ ID NO: 54808 - DNA, 22 bp, synthetic construct
  misc_feature 1..22: note = chemically synthesized
  source 1..22: mol_type = other DNA
aacaaatactcagggtatttgt

SEQ ID NO: 54809 - DNA, 22 bp, synthetic construct
  misc_feature 1..22: note = chemically synthesized
  source 1..22: mol_type = other DNA
agggtatttgttgagtgggtta

SEQ ID NO: 54810 - DNA, 22 bp, synthetic construct
  misc_feature 1..22: note = chemically synthesized
  source 1..22: mol_type = other DNA
gttgagtgggttaggtccccac

SEQ ID NO: 54811 - DNA, 22 bp, synthetic construct
  misc_feature 1..22: note = chemically synthesized
  source 1..22: mol_type = other DNA
ttgagtgggttaggtccccaca

SEQ ID NO: 54812 - DNA, 22 bp, synthetic construct
  misc_feature 1..22: note = chemically synthesized
  source 1..22: mol_type = other DNA
agtgggttaggtccccacattt

SEQ ID NO: 54813 - DNA, 22 bp, synthetic construct
  misc_feature 1..22: note = chemically synthesized
  source 1..22: mol_type = other DNA
ggtccccacatttttatacata

SEQ ID NO: 54814 - DNA, 22 bp, synthetic construct
  misc_feature 1..22: note = chemically synthesized
  source 1..22: mol_type = other DNA
ttatacatacatacacacatac

SEQ ID NO: 54815 - DNA, 22 bp, synthetic construct
  misc_feature 1..22: note = chemically synthesized
  source 1..22: mol_type = other DNA
tatacatacatacacacataca

SEQ ID NO: 54816 - DNA, 22 bp, synthetic construct
  misc_feature 1..22: note = chemically synthesized
  source 1..22: mol_type = other DNA
atacatacatacacacatacac

SEQ ID NO: 54817 - DNA, 22 bp, synthetic construct
  misc_feature 1..22: note = chemically synthesized
  source 1..22: mol_type = other DNA
tacatacatacacacatacaca

SEQ ID NO: 54818 - DNA, 22 bp, synthetic construct
  misc_feature 1..22: note = chemically synthesized
  source 1..22: mol_type = other DNA
tgaatgtaagtgtgtgtccttt

SEQ ID NO: 54819 - DNA, 22 bp, synthetic construct
  misc_feature 1..22: note = chemically synthesized
  source 1..22: mol_type = other DNA
tacaaatactagcttatttagc

SEQ ID NO: 54820 - DNA, 22 bp, synthetic construct
  misc_feature 1..22: note = chemically synthesized
  source 1..22: mol_type = other DNA
acaaatactagcttatttagct

SEQ ID NO: 54821 - DNA, 22 bp, synthetic construct
  misc_feature 1..22: note = chemically synthesized
  source 1..22: mol_type = other DNA
caaatactagcttatttagctc

SEQ ID NO: 54822 - DNA, 22 bp, synthetic construct
  misc_feature 1..22: note = chemically synthesized
  source 1..22: mol_type = other DNA
gcttatttagctcatggtatag

SEQ ID NO: 54823 - DNA, 22 bp, synthetic construct
  misc_feature 1..22: note = chemically synthesized
  source 1..22: mol_type = other DNA
atttagctcatggtataggtag

SEQ ID NO: 54824 - DNA, 22 bp, synthetic construct
  misc_feature 1..22: note = chemically synthesized
  source 1..22: mol_type = other DNA
tttagctcatggtataggtagg

SEQ ID NO: 54825 - DNA, 22 bp, synthetic construct
  misc_feature 1..22: note = chemically synthesized
  source 1..22: mol_type = other DNA
agctcatggtataggtagggta

SEQ ID NO: 54826 - DNA, 22 bp, synthetic construct
  misc_feature 1..22: note = chemically synthesized
  source 1..22: mol_type = other DNA
gctcatggtataggtagggtag

SEQ ID NO: 54827 - DNA, 22 bp, synthetic construct
  misc_feature 1..22: note = chemically synthesized
  source 1..22: mol_type = other DNA
atggtataggtagggtagcata

SEQ ID NO: 54828 - DNA, 22 bp, synthetic construct
  misc_feature 1..22: note = chemically synthesized
  source 1..22: mol_type = other DNA
tataaacaaagaaatctagact

SEQ ID NO: 54829 - DNA, 22 bp, synthetic construct
  misc_feature 1..22: note = chemically synthesized
  source 1..22: mol_type = other DNA
ataaacaaagaaatctagactt

SEQ ID NO: 54830 - DNA, 22 bp, synthetic construct
  misc_feature 1..22: note = chemically synthesized
  source 1..22: mol_type = other DNA
taaacaaagaaatctagactta

SEQ ID NO: 54831 - DNA, 22 bp, synthetic construct
  misc_feature 1..22: note = chemically synthesized
  source 1..22: mol_type = other DNA
gacttaggaaaatcatgttatt

SEQ ID NO: 54832 - DNA, 22 bp, synthetic construct
  misc_feature 1..22: note = chemically synthesized
  source 1..22: mol_type = other DNA
aggaaaatcatgttatttgtct

SEQ ID NO: 54833 - DNA, 22 bp, synthetic construct
  misc_feature 1..22: note = chemically synthesized
  source 1..22: mol_type = other DNA
ggaaaatcatgttatttgtctc

SEQ ID NO: 54834 - DNA, 22 bp, synthetic construct
  misc_feature 1..22: note = chemically synthesized
  source 1..22: mol_type = other DNA
tttgtctcgtgaccaaattccc

SEQ ID NO: 54835 - DNA, 22 bp, synthetic construct
  misc_feature 1..22: note = chemically synthesized
  source 1..22: mol_type = other DNA
gtctcgtgaccaaattcccaaa

SEQ ID NO: 54836 - DNA, 22 bp, synthetic construct
  misc_feature 1..22: note = chemically synthesized
  source 1..22: mol_type = other DNA
tctcgtgaccaaattcccaaat

SEQ ID NO: 54837 - DNA, 22 bp, synthetic construct
  misc_feature 1..22: note = chemically synthesized
  source 1..22: mol_type = other DNA
gtgaccaaattcccaaatcaag

SEQ ID NO: 54838 - DNA, 22 bp, synthetic construct
  misc_feature 1..22: note = chemically synthesized
  source 1..22: mol_type = other DNA
ccaaatcaaggaaataaagaaa

SEQ ID NO: 54839 - DNA, 22 bp, synthetic construct
  misc_feature 1..22: note = chemically synthesized
  source 1..22: mol_type = other DNA
gatttaagccagatttccaaga

SEQ ID NO: 54840 - DNA, 22 bp, synthetic construct
  misc_feature 1..22: note = chemically synthesized
  source 1..22: mol_type = other DNA
aagccagatttccaagaaaaaa

SEQ ID NO: 54841 - DNA, 22 bp, synthetic construct
  misc_feature 1..22: note = chemically synthesized
  source 1..22: mol_type = other DNA
agccagatttccaagaaaaaat

SEQ ID NO: 54842 - DNA, 22 bp, synthetic construct
  misc_feature 1..22: note = chemically synthesized
  source 1..22: mol_type = other DNA
ccaagaaaaaatctagggctct

SEQ ID NO: 54843 - DNA, 22 bp, synthetic construct
  misc_feature 1..22: note = chemically synthesized
  source 1..22: mol_type = other DNA
caagaaaaaatctagggctctt

SEQ ID NO: 54844 - DNA, 22 bp, synthetic construct
  misc_feature 1..22: note = chemically synthesized
  source 1..22: mol_type = other DNA
gggctcttctcactttttcatc

SEQ ID NO: 54845 - DNA, 22 bp, synthetic construct
  misc_feature 1..22: note = chemically synthesized
  source 1..22: mol_type = other DNA
ttctcactttttcatctttgtt

SEQ ID NO: 54846 - DNA, 22 bp, synthetic construct
  misc_feature 1..22: note = chemically synthesized
  source 1..22: mol_type = other DNA
ctcactttttcatctttgttcc

SEQ ID NO: 54847 - DNA, 22 bp, synthetic construct
  misc_feature 1..22: note = chemically synthesized
  source 1..22: mol_type = other DNA
tcactttttcatctttgttcca

SEQ ID NO: 54848 - DNA, 22 bp, synthetic construct
  misc_feature 1..22: note = chemically synthesized
  source 1..22: mol_type = other DNA
actttttcatctttgttccaac

SEQ ID NO: 54849 - DNA, 22 bp, synthetic construct
  misc_feature 1..22: note = chemically synthesized
  source 1..22: mol_type = other DNA
tttcatctttgttccaacattt

SEQ ID NO: 54850 - DNA, 22 bp, synthetic construct
  misc_feature 1..22: note = chemically synthesized
  source 1..22: mol_type = other DNA
ttcatctttgttccaacatttg

SEQ ID NO: 54851 - DNA, 22 bp, synthetic construct
  misc_feature 1..22: note = chemically synthesized
  source 1..22: mol_type = other DNA
tcatctttgttccaacatttga

SEQ ID NO: 54852 - DNA, 22 bp, synthetic construct
  misc_feature 1..22: note = chemically synthesized
  source 1..22: mol_type = other DNA
catctttgttccaacatttgaa

SEQ ID NO: 54853 - DNA, 22 bp, synthetic construct
  misc_feature 1..22: note = chemically synthesized
  source 1..22: mol_type = other DNA
atctttgttccaacatttgaaa

SEQ ID NO: 54854 - DNA, 22 bp, synthetic construct
  misc_feature 1..22: note = chemically synthesized
  source 1..22: mol_type = other DNA
tgttccaacatttgaaaaaata

SEQ ID NO: 54855 - DNA, 22 bp, synthetic construct
  misc_feature 1..22: note = chemically synthesized
  source 1..22: mol_type = other DNA
gttccaacatttgaaaaaataa

SEQ ID NO: 54856 - DNA, 22 bp, synthetic construct
  misc_feature 1..22: note = chemically synthesized
  source 1..22: mol_type = other DNA
ttccaacatttgaaaaaataaa

SEQ ID NO: 54857 - DNA, 22 bp, synthetic construct
  misc_feature 1..22: note = chemically synthesized
  source 1..22: mol_type = other DNA
caacatttgaaaaaataaatct

SEQ ID NO: 54858 - DNA, 22 bp, synthetic construct
  misc_feature 1..22: note = chemically synthesized
  source 1..22: mol_type = other DNA
gaaaaaataaatctaaacacat

SEQ ID NO: 54859 - DNA, 22 bp, synthetic construct
  misc_feature 1..22: note = chemically synthesized
  source 1..22: mol_type = other DNA
aaaaaataaatctaaacacatt

SEQ ID NO: 54860 - DNA, 22 bp, synthetic construct
  misc_feature 1..22: note = chemically synthesized
  source 1..22: mol_type = other DNA
aacacattccaatgtaactgaa

SEQ ID NO: 54861 - DNA, 22 bp, synthetic construct
  misc_feature 1..22: note = chemically synthesized
  source 1..22: mol_type = other DNA
caatgtaactgaagagcaggtt

SEQ ID NO: 54862 - DNA, 22 bp, synthetic construct
  misc_feature 1..22: note = chemically synthesized
  source 1..22: mol_type = other DNA
aagagcaggttaattgtttgcc

SEQ ID NO: 54863 - DNA, 22 bp, synthetic construct
  misc_feature 1..22: note = chemically synthesized
  source 1..22: mol_type = other DNA
attgtttgccacttgcagaatc

SEQ ID NO: 54864 - DNA, 22 bp, synthetic construct
  misc_feature 1..22: note = chemically synthesized
  source 1..22: mol_type = other DNA
tttgccacttgcagaatccaat

SEQ ID NO: 54865 - DNA, 22 bp, synthetic construct
  misc_feature 1..22: note = chemically synthesized
  source 1..22: mol_type = other DNA
gccacttgcagaatccaattaa

SEQ ID NO: 54866 - DNA, 22 bp, synthetic construct
  misc_feature 1..22: note = chemically synthesized
  source 1..22: mol_type = other DNA
ccacttgcagaatccaattaag

SEQ ID NO: 54867 - DNA, 22 bp, synthetic construct
  misc_feature 1..22: note = chemically synthesized
  source 1..22: mol_type = other DNA
gcagaatccaattaagaagaga

SEQ ID NO: 54868 - DNA, 22 bp, synthetic construct
  misc_feature 1..22: note = chemically synthesized
  source 1..22: mol_type = other DNA
cagaatccaattaagaagagag

SEQ ID NO: 54869 - DNA, 22 bp, synthetic construct
  misc_feature 1..22: note = chemically synthesized
  source 1..22: mol_type = other DNA
agaagagagaagtctggtataa

SEQ ID NO: 54870 - DNA, 22 bp, synthetic construct
  misc_feature 1..22: note = chemically synthesized
  source 1..22: mol_type = other DNA
gtataaagaaagtgatttgctt

SEQ ID NO: 54871 - DNA, 22 bp, synthetic construct
  misc_feature 1..22: note = chemically synthesized
  source 1..22: mol_type = other DNA
gcttccaaagctagcttagggg

SEQ ID NO: 54872 - DNA, 22 bp, synthetic construct
  misc_feature 1..22: note = chemically synthesized
  source 1..22: mol_type = other DNA
cttccaaagctagcttagggga

SEQ ID NO: 54873 - DNA, 22 bp, synthetic construct
  misc_feature 1..22: note = chemically synthesized
  source 1..22: mol_type = other DNA
ccaaagctagcttaggggaaga

SEQ ID NO: 54874 - DNA, 22 bp, synthetic construct
  misc_feature 1..22: note = chemically synthesized
  source 1..22: mol_type = other DNA
caaagctagcttaggggaagaa

SEQ ID NO: 54875 - DNA, 22 bp, synthetic construct
  misc_feature 1..22: note = chemically synthesized
  source 1..22: mol_type = other DNA
gcttaggggaagaaatgcagca

SEQ ID NO: 54876 - DNA, 22 bp, synthetic construct
  misc_feature 1..22: note = chemically synthesized
  source 1..22: mol_type = other DNA
aggggaagaaatgcagcagtcc

SEQ ID NO: 54877 - DNA, 22 bp, synthetic construct
  misc_feature 1..22: note = chemically synthesized
  source 1..22: mol_type = other DNA
ggggaagaaatgcagcagtcct

SEQ ID NO: 54878 - DNA, 22 bp, synthetic construct
  misc_feature 1..22: note = chemically synthesized
  source 1..22: mol_type = other DNA
ccgtactacttcactttaggag

SEQ ID NO: 54879 - DNA, 22 bp, synthetic construct
  misc_feature 1..22: note = chemically synthesized
  source 1..22: mol_type = other DNA
cttcactttaggagcagaaagt

SEQ ID NO: 54880 - DNA, 22 bp, synthetic construct
  misc_feature 1..22: note = chemically synthesized
  source 1..22: mol_type = other DNA
cactttaggagcagaaagtggc

SEQ ID NO: 54881 - DNA, 22 bp, synthetic construct
  misc_feature 1..22: note = chemically synthesized
  source 1..22: mol_type = other DNA
actttaggagcagaaagtggca

SEQ ID NO: 54882 - DNA, 22 bp, synthetic construct
  misc_feature 1..22: note = chemically synthesized
  source 1..22: mol_type = other DNA
taggagcagaaagtggcacttt

SEQ ID NO: 54883 - DNA, 22 bp, synthetic construct
  misc_feature 1..22: note = chemically synthesized
  source 1..22: mol_type = other DNA
aggagcagaaagtggcactttt

SEQ ID NO: 54884 - DNA, 22 bp, synthetic construct
  misc_feature 1..22: note = chemically synthesized
  source 1..22: mol_type = other DNA
ggagcagaaagtggcactttta

SEQ ID NO: 54885 - DNA, 22 bp, synthetic construct
  misc_feature 1..22: note = chemically synthesized
  source 1..22: mol_type = other DNA
ttaaaaggcaacagaggaggcg

SEQ ID NO: 54886 - DNA, 22 bp, synthetic construct
  misc_feature 1..22: note = chemically synthesized
  source 1..22: mol_type = other DNA
taaaaggcaacagaggaggcga

SEQ ID NO: 54887 - DNA, 22 bp, synthetic construct
  misc_feature 1..22: note = chemically synthesized
  source 1..22: mol_type = other DNA
aaaaggcaacagaggaggcgag

SEQ ID NO: 54888 - DNA, 22 bp, synthetic construct
  misc_feature 1..22: note = chemically synthesized
  source 1..22: mol_type = other DNA
aaaggcaacagaggaggcgagc

SEQ ID NO: 54889 - DNA, 22 bp, synthetic construct
  misc_feature 1..22: note = chemically synthesized
  source 1..22: mol_type = other DNA
aggggtccatgctagcttgggc

SEQ ID NO: 54890 - DNA, 22 bp, synthetic construct
  misc_feature 1..22: note = chemically synthesized
  source 1..22: mol_type = other DNA
gcttgggcaccttatccaccag

SEQ ID NO: 54891 - DNA, 22 bp, synthetic construct
  misc_feature 1..22: note = chemically synthesized
  source 1..22: mol_type = other DNA
gggcaccttatccaccaggtag

SEQ ID NO: 54892 - DNA, 22 bp, synthetic construct
  misc_feature 1..22: note = chemically synthesized
  source 1..22: mol_type = other DNA
ggcaccttatccaccaggtagt

SEQ ID NO: 54893 - DNA, 22 bp, synthetic construct
  misc_feature 1..22: note = chemically synthesized
  source 1..22: mol_type = other DNA
atccaccaggtagttgagcagt

SEQ ID NO: 54894 - DNA, 22 bp, synthetic construct
  misc_feature 1..22: note = chemically synthesized
  source 1..22: mol_type = other DNA
tccaccaggtagttgagcagtt

SEQ ID NO: 54895 - DNA, 22 bp, synthetic construct
  misc_feature 1..22: note = chemically synthesized
  source 1..22: mol_type = other DNA
agcagttgcctgctggtgcctt

SEQ ID NO: 54896 - DNA, 22 bp, synthetic construct
  misc_feature 1..22: note = chemically synthesized
  source 1..22: mol_type = other DNA
cctgctggtgcctttgtgagca

SEQ ID NO: 54897 - DNA, 22 bp, synthetic construct
  misc_feature 1..22: note = chemically synthesized
  source 1..22: mol_type = other DNA
ctggtgcctttgtgagcagggt

SEQ ID NO: 54898 - DNA, 22 bp, synthetic construct
  misc_feature 1..22: note = chemically synthesized
  source 1..22: mol_type = other DNA
gtgcctttgtgagcagggtgtt

SEQ ID NO: 54899 - DNA, 22 bp, synthetic construct
  misc_feature 1..22: note = chemically synthesized
  source 1..22: mol_type = other DNA
tgtgagcagggtgttgtccctt

SEQ ID NO: 54900 - DNA, 22 bp, synthetic construct
  misc_feature 1..22: note = chemically synthesized
  source 1..22: mol_type = other DNA
gtgagcagggtgttgtcccttg

SEQ ID NO: 54901 - DNA, 22 bp, synthetic construct
  misc_feature 1..22: note = chemically synthesized
  source 1..22: mol_type = other DNA
tgagcagggtgttgtcccttga

SEQ ID NO: 54902 - DNA, 22 bp, synthetic construct
  misc_feature 1..22: note = chemically synthesized
  source 1..22: mol_type = other DNA
tcccttgaggcaaatctctgga

SEQ ID NO: 54903 - DNA, 22 bp, synthetic construct
  misc_feature 1..22: note = chemically synthesized
  source 1..22: mol_type = other DNA
gaggcaaatctctggagggtga

SEQ ID NO: 54904 - DNA, 22 bp, synthetic construct
  misc_feature 1..22: note = chemically synthesized
  source 1..22: mol_type = other DNA
aggcaaatctctggagggtgag

SEQ ID NO: 54905 - DNA, 22 bp, synthetic construct
  misc_feature 1..22: note = chemically synthesized
  source 1..22: mol_type = other DNA
tggagggtgagagttttgtagt

SEQ ID NO: 54906 - DNA, 22 bp, synthetic construct
  misc_feature 1..22: note = chemically synthesized
  source 1..22: mol_type = other DNA
gagggtgagagttttgtagtgg

SEQ ID NO: 54907 - DNA, 22 bp, synthetic construct
  misc_feature 1..22: note = chemically synthesized
  source 1..22: mol_type = other DNA
tgtagtgggcatgctttggttt

SEQ ID NO: 54908 - DNA, 22 bp, synthetic construct
  misc_feature 1..22: note = chemically synthesized
  source 1..22: mol_type = other DNA
gtagtgggcatgctttggttta

SEQ ID NO: 54909 - DNA, 22 bp, synthetic construct
  misc_feature 1..22: note = chemically synthesized
  source 1..22: mol_type = other DNA
tagtgggcatgctttggtttat

SEQ ID NO: 54910 - DNA, 22 bp, synthetic construct
  misc_feature 1..22: note = chemically synthesized
  source 1..22: mol_type = other DNA
tggtttataaatcacctgtgaa

SEQ ID NO: 54911 - DNA, 22 bp, synthetic construct
  misc_feature 1..22: note = chemically synthesized
  source 1..22: mol_type = other DNA
ggtttataaatcacctgtgaac

SEQ ID NO: 54912 - DNA, 22 bp, synthetic construct
  misc_feature 1..22: note = chemically synthesized
  source 1..22: mol_type = other DNA
gtttataaatcacctgtgaact

SEQ ID NO: 54913 - DNA, 22 bp, synthetic construct
  misc_feature 1..22: note = chemically synthesized
  source 1..22: mol_type = other DNA
ataaatcacctgtgaactcagg

SEQ ID NO: 54914 - DNA, 22 bp, synthetic construct
  misc_feature 1..22: note = chemically synthesized
  source 1..22: mol_type = other DNA
taaatcacctgtgaactcagga

SEQ ID NO: 54915 - DNA, 22 bp, synthetic construct
  misc_feature 1..22: note = chemically synthesized
  source 1..22: mol_type = other DNA
tgaactcaggagttccatcttg

SEQ ID NO: 54916 - DNA, 22 bp, synthetic construct
  misc_feature 1..22: note = chemically synthesized
  source 1..22: mol_type = other DNA
aggagttccatcttgaagcaca

SEQ ID NO: 54917 - DNA, 22 bp, synthetic construct
  misc_feature 1..22: note = chemically synthesized
  source 1..22: mol_type = other DNA
catcttgaagcacatacatagt

SEQ ID NO: 54918 - DNA, 22 bp, synthetic construct
  misc_feature 1..22: note = chemically synthesized
  source 1..22: mol_type = other DNA
gaagcacatacatagttagatg

SEQ ID NO: 54919 - DNA, 22 bp, synthetic construct
  misc_feature 1..22: note = chemically synthesized
  source 1..22: mol_type = other DNA
aagcacatacatagttagatga

SEQ ID NO: 54920 - DNA, 22 bp, synthetic construct
  misc_feature 1..22: note = chemically synthesized
  source 1..22: mol_type = other DNA
gatgaacttgccctgcagggag

SEQ ID NO: 54921 - DNA, 22 bp, synthetic construct
  misc_feature 1..22: note = chemically synthesized
  source 1..22: mol_type = other DNA
gccctgcagggagagtctgatg

SEQ ID NO: 54922 - DNA, 22 bp, synthetic construct
  misc_feature 1..22: note = chemically synthesized
  source 1..22: mol_type = other DNA
ccctgcagggagagtctgatga

SEQ ID NO: 54923 - DNA, 22 bp, synthetic construct
  misc_feature 1..22: note = chemically synthesized
  source 1..22: mol_type = other DNA
cagggagagtctgatgaaaggg

SEQ ID NO: 54924 - DNA, 22 bp, synthetic construct
  misc_feature 1..22: note = chemically synthesized
  source 1..22: mol_type = other DNA
atgaaagggaggtagatgcttg

SEQ ID NO: 54925 - DNA, 22 bp, synthetic construct
  misc_feature 1..22: note = chemically synthesized
  source 1..22: mol_type = other DNA
gcaatttaatctataaattacc

SEQ ID NO: 54926 - DNA, 22 bp, synthetic construct
  misc_feature 1..22: note = chemically synthesized
  source 1..22: mol_type = other DNA
caatttaatctataaattacca

SEQ ID NO: 54927 - DNA, 22 bp, synthetic construct
  misc_feature 1..22: note = chemically synthesized
  source 1..22: mol_type = other DNA
aatctataaattaccagataaa

SEQ ID NO: 54928 - DNA, 22 bp, synthetic construct
  misc_feature 1..22: note = chemically synthesized
  source 1..22: mol_type = other DNA
atctataaattaccagataaaa

SEQ ID NO: 54929 - DNA, 22 bp, synthetic construct
  misc_feature 1..22: note = chemically synthesized
  source 1..22: mol_type = other DNA
taaattaccagataaaatttta

SEQ ID NO: 54930 - DNA, 22 bp, synthetic construct
  misc_feature 1..22: note = chemically synthesized
  source 1..22: mol_type = other DNA
ccagataaaattttacaagttg

SEQ ID NO: 54931 - DNA, 22 bp, synthetic construct
  misc_feature 1..22: note = chemically synthesized
  source 1..22: mol_type = other DNA
tacaagttgactttaaagtcaa

SEQ ID NO: 54932 - DNA, 22 bp, synthetic construct
  misc_feature 1..22: note = chemically synthesized
  source 1..22: mol_type = other DNA
acaagttgactttaaagtcaaa

SEQ ID NO: 54933 - DNA, 22 bp, synthetic construct
  misc_feature 1..22: note = chemically synthesized
  source 1..22: mol_type = other DNA
caagttgactttaaagtcaaac

SEQ ID NO: 54934 - DNA, 22 bp, synthetic construct
  misc_feature 1..22: note = chemically synthesized
  source 1..22: mol_type = other DNA
actttaaagtcaaacacatttg

SEQ ID NO: 54935 - DNA, 22 bp, synthetic construct
  misc_feature 1..22: note = chemically synthesized
  source 1..22: mol_type = other DNA
taaagtcaaacacatttgaatt

SEQ ID NO: 54936 - DNA, 22 bp, synthetic construct
  misc_feature 1..22: note = chemically synthesized
  source 1..22: mol_type = other DNA
aaagtcaaacacatttgaattt

SEQ ID NO: 54937 - DNA, 22 bp, synthetic construct
  misc_feature 1..22: note = chemically synthesized
  source 1..22: mol_type = other DNA
aagtcaaacacatttgaattta

SEQ ID NO: 54938 - DNA, 22 bp, synthetic construct
  misc_feature 1..22: note = chemically synthesized
  source 1..22: mol_type = other DNA
gaatttagtggaagccattcaa

SEQ ID NO: 54939 - DNA, 22 bp, synthetic construct
  misc_feature 1..22: note = chemically synthesized
  source 1..22: mol_type = other DNA
aatttagtggaagccattcaag

SEQ ID NO: 54940 - DNA, 22 bp, synthetic construct
  misc_feature 1..22: note = chemically synthesized
  source 1..22: mol_type = other DNA
agtggaagccattcaagaaaat

SEQ ID NO: 54941 - DNA, 22 bp, synthetic construct
  misc_feature 1..22: note = chemically synthesized
  source 1..22: mol_type = other DNA
gtggaagccattcaagaaaata

SEQ ID NO: 54942 - DNA, 22 bp, synthetic construct
  misc_feature 1..22: note = chemically synthesized
  source 1..22: mol_type = other DNA
aagaaaatatcaaagaaaatac

SEQ ID NO: 54943 - DNA, 22 bp, synthetic construct
  misc_feature 1..22: note = chemically synthesized
  source 1..22: mol_type = other DNA
agcaaagagttttttggggaaa

SEQ ID NO: 54944 - DNA, 22 bp, synthetic construct
  misc_feature 1..22: note = chemically synthesized
  source 1..22: mol_type = other DNA
tttggggaaattggtgtctatg

SEQ ID NO: 54945 - DNA, 22 bp, synthetic construct
  misc_feature 1..22: note = chemically synthesized
  source 1..22: mol_type = other DNA
ttggggaaattggtgtctatgt

SEQ ID NO: 54946 - DNA, 22 bp, synthetic construct
  misc_feature 1..22: note = chemically synthesized
  source 1..22: mol_type = other DNA
tggggaaattggtgtctatgtc

SEQ ID NO: 54947 - DNA, 22 bp, synthetic construct
  misc_feature 1..22: note = chemically synthesized
  source 1..22: mol_type = other DNA
ggggaaattggtgtctatgtct

SEQ ID NO: 54948 - DNA, 22 bp, synthetic construct
  misc_feature 1..22: note = chemically synthesized
  source 1..22: mol_type = other DNA
gggaaattggtgtctatgtctg

SEQ ID NO: 54949 - DNA, 22 bp, synthetic construct
  misc_feature 1..22: note = chemically synthesized
  source 1..22: mol_type = other DNA
gtgtctatgtctgtgtgtgtag

SEQ ID NO: 54950 - DNA, 22 bp, synthetic construct
  misc_feature 1..22: note = chemically synthesized
  source 1..22: mol_type = other DNA
tgtctgtgtgtgtagggagtgc

SEQ ID NO: 54951 - DNA, 22 bp, synthetic construct
  misc_feature 1..22: note = chemically synthesized
  source 1..22: mol_type = other DNA
tgtgtgtagggagtgcagggga

SEQ ID NO: 54952 - DNA, 22 bp, synthetic construct
  misc_feature 1..22: note = chemically synthesized
  source 1..22: mol_type = other DNA
tatttcagcccatggaaactag

SEQ ID NO: 54953 - DNA, 22 bp, synthetic construct
  misc_feature 1..22: note = chemically synthesized
  source 1..22: mol_type = other DNA
tttcagcccatggaaactagga

SEQ ID NO: 54954 - DNA, 22 bp, synthetic construct
  misc_feature 1..22: note = chemically synthesized
  source 1..22: mol_type = other DNA
cagcccatggaaactaggatgt

SEQ ID NO: 54955 - DNA, 22 bp, synthetic construct
  misc_feature 1..22: note = chemically synthesized
  source 1..22: mol_type = other DNA
agcccatggaaactaggatgta

SEQ ID NO: 54956 - DNA, 22 bp, synthetic construct
  misc_feature 1..22: note = chemically synthesized
  source 1..22: mol_type = other DNA
ggatgtagatcactgtgaactt

SEQ ID NO: 54957 - DNA, 22 bp, synthetic construct
  misc_feature 1..22: note = chemically synthesized
  source 1..22: mol_type = other DNA
tgaacttattcagcaggctaca

SEQ ID NO: 54958 - DNA, 22 bp, synthetic construct
  misc_feature 1..22: note = chemically synthesized
  source 1..22: mol_type = other DNA
attcagcaggctacacccaaag

SEQ ID NO: 54959 - DNA, 22 bp, synthetic construct
  misc_feature 1..22: note = chemically synthesized
  source 1..22: mol_type = other DNA
ttcagcaggctacacccaaagg

SEQ ID NO: 54960 - DNA, 22 bp, synthetic construct
  misc_feature 1..22: note = chemically synthesized
  source 1..22: mol_type = other DNA
agcaggctacacccaaaggcta

SEQ ID NO: 54961 - DNA, 22 bp, synthetic construct
  misc_feature 1..22: note = chemically synthesized
  source 1..22: mol_type = other DNA
cacccaaaggctagaacaaact

SEQ ID NO: 54962 - DNA, 22 bp, synthetic construct
  misc_feature 1..22: note = chemically synthesized
  source 1..22: mol_type = other DNA
gaacaaacttctctgccacagg

SEQ ID NO: 54963 - DNA, 22 bp, synthetic construct
  misc_feature 1..22: note = chemically synthesized
  source 1..22: mol_type = other DNA
ctctgccacaggattaacatat

SEQ ID NO: 54964 - DNA, 22 bp, synthetic construct
  misc_feature 1..22: note = chemically synthesized
  source 1..22: mol_type = other DNA
tctgccacaggattaacatatg

SEQ ID NO: 54965 - DNA, 22 bp, synthetic construct
  misc_feature 1..22: note = chemically synthesized
  source 1..22: mol_type = other DNA
tgccacaggattaacatatgtt

SEQ ID NO: 54966 - DNA, 22 bp, synthetic construct
  misc_feature 1..22: note = chemically synthesized
  source 1..22: mol_type = other DNA
ccacaggattaacatatgtttt

SEQ ID NO: 54967 - DNA, 22 bp, synthetic construct
  misc_feature 1..22: note = chemically synthesized
  source 1..22: mol_type = other DNA
acatatgttttaatcgacctgg

SEQ ID NO: 54968 - DNA, 22 bp, synthetic construct
  misc_feature 1..22: note = chemically synthesized
  source 1..22: mol_type = other DNA
taatcgacctggggggcacatt

SEQ ID NO: 54969 - DNA, 22 bp, synthetic construct
  misc_feature 1..22: note = chemically synthesized
  source 1..22: mol_type = other DNA
aatcgacctggggggcacattc

SEQ ID NO: 54970 - DNA, 22 bp, synthetic construct
  misc_feature 1..22: note = chemically synthesized
  source 1..22: mol_type = other DNA
atcgacctggggggcacattct

SEQ ID NO: 54971 - DNA, 22 bp, synthetic construct
  misc_feature 1..22: note = chemically synthesized
  source 1..22: mol_type = other DNA
gggggcacattctctgataagc

SEQ ID NO: 54972 - DNA, 22 bp, synthetic construct
  misc_feature 1..22: note = chemically synthesized
  source 1..22: mol_type = other DNA
tctgataagctcttttggaaag

SEQ ID NO: 54973 - DNA, 22 bp, synthetic construct
  misc_feature 1..22: note = chemically synthesized
  source 1..22: mol_type = other DNA
tgataagctcttttggaaagcc

SEQ ID NO: 54974 - DNA, 22 bp, synthetic construct
  misc_feature 1..22: note = chemically synthesized
  source 1..22: mol_type = other DNA
ataagctcttttggaaagccag

SEQ ID NO: 54975 - DNA, 22 bp, synthetic construct
  misc_feature 1..22: note = chemically synthesized
  source 1..22: mol_type = other DNA
ttttggaaagccaggctttctg

SEQ ID NO: 54976 - DNA, 22 bp, synthetic construct
  misc_feature 1..22: note = chemically synthesized
  source 1..22: mol_type = other DNA
ttggaaagccaggctttctgtg

SEQ ID NO: 54977 - DNA, 22 bp, synthetic construct
  misc_feature 1..22: note = chemically synthesized
  source 1..22: mol_type = other DNA
tggaaagccaggctttctgtgg

SEQ ID NO: 54978 - DNA, 22 bp, synthetic construct
  misc_feature 1..22: note = chemically synthesized
  source 1..22: mol_type = other DNA
ggaaagccaggctttctgtgga

SEQ ID NO: 54979 - DNA, 22 bp, synthetic construct
  misc_feature 1..22: note = chemically synthesized
  source 1..22: mol_type = other DNA
gaaagccaggctttctgtggac

SEQ ID NO: 54980 - DNA, 22 bp, synthetic construct
  misc_feature 1..22: note = chemically synthesized
  source 1..22: mol_type = other DNA
tctgtggacgtgttatctttcc

SEQ ID NO: 54981 - DNA, 22 bp, synthetic construct
  misc_feature 1..22: note = chemically synthesized
  source 1..22: mol_type = other DNA
ctgtggacgtgttatctttcca

SEQ ID NO: 54982 - DNA, 22 bp, synthetic construct
  misc_feature 1..22: note = chemically synthesized
  source 1..22: mol_type = other DNA
tgtggacgtgttatctttccaa

SEQ ID NO: 54983 - DNA, 22 bp, synthetic construct
  misc_feature 1..22: note = chemically synthesized
  source 1..22: mol_type = other DNA
tggacgtgttatctttccaatg

SEQ ID NO: 54984 - DNA, 22 bp, synthetic construct
  misc_feature 1..22: note = chemically synthesized
  source 1..22: mol_type = other DNA
tctttccaatgtgtgctggaat

SEQ ID NO: 54985 - DNA, 22 bp, synthetic construct
  misc_feature 1..22: note = chemically synthesized
  source 1..22: mol_type = other DNA
tccaatgtgtgctggaatgccc

SEQ ID NO: 54986 - DNA, 22 bp, synthetic construct
  misc_feature 1..22: note = chemically synthesized
  source 1..22: mol_type = other DNA
ccaatgtgtgctggaatgcccg

SEQ ID NO: 54987 - DNA, 22 bp, synthetic construct
  misc_feature 1..22: note = chemically synthesized
  source 1..22: mol_type = other DNA
caatgtgtgctggaatgcccgg

SEQ ID NO: 54988 - DNA, 22 bp, synthetic construct
  misc_feature 1..22: note = chemically synthesized
  source 1..22: mol_type = other DNA
gaatgcccggggagaggaaaaa

SEQ ID NO: 54989 - DNA, 22 bp, synthetic construct
  misc_feature 1..22: note = chemically synthesized
  source 1..22: mol_type = other DNA
cttttacagccatgctcagtga

SEQ ID NO: 54990 - DNA, 22 bp, synthetic construct
  misc_feature 1..22: note = chemically synthesized
  source 1..22: mol_type = other DNA
ttttacagccatgctcagtgag

SEQ ID NO: 54991 - DNA, 22 bp, synthetic construct
  misc_feature 1..22: note = chemically synthesized
  source 1..22: mol_type = other DNA
ttacagccatgctcagtgagaa

SEQ ID NO: 54992 - DNA, 22 bp, synthetic construct
  misc_feature 1..22: note = chemically synthesized
  source 1..22: mol_type = other DNA
tacagccatgctcagtgagaag

SEQ ID NO: 54993 - DNA, 22 bp, synthetic construct
  misc_feature 1..22: note = chemically synthesized
  source 1..22: mol_type = other DNA
acagccatgctcagtgagaagc

SEQ ID NO: 54994 - DNA, 22 bp, synthetic construct
  misc_feature 1..22: note = chemically synthesized
  source 1..22: mol_type = other DNA
cagccatgctcagtgagaagcg

SEQ ID NO: 54995 - DNA, 22 bp, synthetic construct
  misc_feature 1..22: note = chemically synthesized
  source 1..22: mol_type = other DNA
agtgagaagcggagaaacatct

SEQ ID NO: 54996 - DNA, 22 bp, synthetic construct
  misc_feature 1..22: note = chemically synthesized
  source 1..22: mol_type = other DNA
ctattcacaaattgctaagtct

SEQ ID NO: 54997 - DNA, 22 bp, synthetic construct
  misc_feature 1..22: note = chemically synthesized
  source 1..22: mol_type = other DNA
tattcacaaattgctaagtctt

SEQ ID NO: 54998 - DNA, 22 bp, synthetic construct
  misc_feature 1..22: note = chemically synthesized
  source 1..22: mol_type = other DNA
ttcacaaattgctaagtctttt

SEQ ID NO: 54999 - DNA, 22 bp, synthetic construct
  misc_feature 1..22: note = chemically synthesized
  source 1..22: mol_type = other DNA
acaaattgctaagtcttttaca

SEQ ID NO: 55000 - DNA, 22 bp, synthetic construct
  misc_feature 1..22: note = chemically synthesized
  source 1..22: mol_type = other DNA
ctaagtcttttacacatgcaaa

SEQ ID NO: 55001 - DNA, 22 bp, synthetic construct
  misc_feature 1..22: note = chemically synthesized
  source 1..22: mol_type = other DNA
agtcttttacacatgcaaatat

SEQ ID NO: 55002 - DNA, 22 bp, synthetic construct
  misc_feature 1..22: note = chemically synthesized
  source 1..22: mol_type = other DNA
ttacacatgcaaatatgcatac

SEQ ID NO: 55003 - DNA, 22 bp, synthetic construct
  misc_feature 1..22: note = chemically synthesized
  source 1..22: mol_type = other DNA
tacacatgcaaatatgcataca

SEQ ID NO: 55004 - DNA, 22 bp, synthetic construct
  misc_feature 1..22: note = chemically synthesized
  source 1..22: mol_type = other DNA
acacatgcaaatatgcatacac

SEQ ID NO: 55005 - DNA, 22 bp, synthetic construct
  misc_feature 1..22: note = chemically synthesized
  source 1..22: mol_type = other DNA
cacatgcaaatatgcatacaca

SEQ ID NO: 55006 - DNA, 22 bp, synthetic construct
  misc_feature 1..22: note = chemically synthesized
  source 1..22: mol_type = other DNA
acacaccacagtgaggaagaaa

SEQ ID NO: 55007 - DNA, 22 bp, synthetic construct
  misc_feature 1..22: note = chemically synthesized
  source 1..22: mol_type = other DNA
tcacaccattaataaaatacat

SEQ ID NO: 55008 - DNA, 22 bp, synthetic construct
  misc_feature 1..22: note = chemically synthesized
  source 1..22: mol_type = other DNA
acaccattaataaaatacattt

SEQ ID NO: 55009 - DNA, 22 bp, synthetic construct
  misc_feature 1..22: note = chemically synthesized
  source 1..22: mol_type = other DNA
ataaaatacatttacttcagta

SEQ ID NO: 55010 - DNA, 22 bp, synthetic construct
  misc_feature 1..22: note = chemically synthesized
  source 1..22: mol_type = other DNA
acttcagtagcaatatacatct

SEQ ID NO: 55011 - DNA, 22 bp, synthetic construct
  misc_feature 1..22: note = chemically synthesized
  source 1..22: mol_type = other DNA
cttcagtagcaatatacatcta

SEQ ID NO: 55012 - DNA, 22 bp, synthetic construct
  misc_feature 1..22: note = chemically synthesized
  source 1..22: mol_type = other DNA
cagtagcaatatacatctacat

SEQ ID NO: 55013 - DNA, 22 bp, synthetic construct
  misc_feature 1..22: note = chemically synthesized
  source 1..22: mol_type = other DNA
agtagcaatatacatctacatt

SEQ ID NO: 55014 - DNA, 22 bp, synthetic construct
  misc_feature 1..22: note = chemically synthesized
  source 1..22: mol_type = other DNA
cattttgcctataatataaaag

SEQ ID NO: 55015 - DNA, 22 bp, synthetic construct
  misc_feature 1..22: note = chemically synthesized
  source 1..22: mol_type = other DNA
tgcctataatataaaagtattt

SEQ ID NO: 55016 - DNA, 22 bp, synthetic construct
  misc_feature 1..22: note = chemically synthesized
  source 1..22: mol_type = other DNA
gcctataatataaaagtatttt

SEQ ID NO: 55017 - DNA, 22 bp, synthetic construct
  misc_feature 1..22: note = chemically synthesized
  source 1..22: mol_type = other DNA
cctataatataaaagtattttt

SEQ ID NO: 55018 - DNA, 22 bp, synthetic construct
  misc_feature 1..22: note = chemically synthesized
  source 1..22: mol_type = other DNA
taatataaaagtatttttccta

SEQ ID NO: 55019 - DNA, 22 bp, synthetic construct
  misc_feature 1..22: note = chemically synthesized
  source 1..22: mol_type = other DNA
ttcctattaaaagatttgttta

SEQ ID NO: 55020 - DNA, 22 bp, synthetic construct
  misc_feature 1..22: note = chemically synthesized
  source 1..22: mol_type = other DNA
tcctattaaaagatttgtttaa

SEQ ID NO: 55021 - DNA, 22 bp, synthetic construct
  misc_feature 1..22: note = chemically synthesized
  source 1..22: mol_type = other DNA
cctattaaaagatttgtttaat

SEQ ID NO: 55022 - DNA, 22 bp, synthetic construct
  misc_feature 1..22: note = chemically synthesized
  source 1..22: mol_type = other DNA
ctattaaaagatttgtttaatg

SEQ ID NO: 55023 - DNA, 22 bp, synthetic construct
  misc_feature 1..22: note = chemically synthesized
  source 1..22: mol_type = other DNA
ttaaaagatttgtttaatgttt

SEQ ID NO: 55024 - DNA, 22 bp, synthetic construct
  misc_feature 1..22: note = chemically synthesized
  source 1..22: mol_type = other DNA
aaagatttgtttaatgtttctt

SEQ ID NO: 55025 - DNA, 22 bp, synthetic construct
  misc_feature 1..22: note = chemically synthesized
  source 1..22: mol_type = other DNA
gtttaatgtttcttcaccaaca

SEQ ID NO: 55026 - DNA, 22 bp, synthetic construct
  misc_feature 1..22: note = chemically synthesized
  source 1..22: mol_type = other DNA
tttaatgtttcttcaccaacaa

SEQ ID NO: 55027 - DNA, 22 bp, synthetic construct
  misc_feature 1..22: note = chemically synthesized
  source 1..22: mol_type = other DNA
aatgtttcttcaccaacaaata

SEQ ID NO: 55028 - DNA, 22 bp, synthetic construct
  misc_feature 1..22: note = chemically synthesized
  source 1..22: mol_type = other DNA
atgtttcttcaccaacaaataa

SEQ ID NO: 55029 - DNA, 22 bp, synthetic construct
  misc_feature 1..22: note = chemically synthesized
  source 1..22: mol_type = other DNA
cttcaccaacaaataaacccta

SEQ ID NO: 55030 - DNA, 22 bp, synthetic construct
  misc_feature 1..22: note = chemically synthesized
  source 1..22: mol_type = other DNA
ttcaccaacaaataaaccctat

SEQ ID NO: 55031 - DNA, 22 bp, synthetic construct
  misc_feature 1..22: note = chemically synthesized
  source 1..22: mol_type = other DNA
caccaacaaataaaccctatta

SEQ ID NO: 55032 - DNA, 22 bp, synthetic construct
  misc_feature 1..22: note = chemically synthesized
  source 1..22: mol_type = other DNA
accaacaaataaaccctattaa

SEQ ID NO: 55033 - DNA, 22 bp, synthetic construct
  misc_feature 1..22: note = chemically synthesized
  source 1..22: mol_type = other DNA
ttaaatccccattgccatatga

SEQ ID NO: 55034 - DNA, 22 bp, synthetic construct
  misc_feature 1..22: note = chemically synthesized
  source 1..22: mol_type = other DNA
aatccccattgccatatgagcc

SEQ ID NO: 55035 - DNA, 22 bp, synthetic construct
  misc_feature 1..22: note = chemically synthesized
  source 1..22: mol_type = other DNA
ccatatgagccctggaggtgaa

SEQ ID NO: 55036 - DNA, 22 bp, synthetic construct
  misc_feature 1..22: note = chemically synthesized
  source 1..22: mol_type = other DNA
gaggtgaatcagagaaacaaaa

SEQ ID NO: 55037 - DNA, 22 bp, synthetic construct
  misc_feature 1..22: note = chemically synthesized
  source 1..22: mol_type = other DNA
tggaaaaatcatcaggttaaaa

SEQ ID NO: 55038 - DNA, 22 bp, synthetic construct
  misc_feature 1..22: note = chemically synthesized
  source 1..22: mol_type = other DNA
aaaaaagaaaaattgattctgt

SEQ ID NO: 55039 - DNA, 22 bp, synthetic construct
  misc_feature 1..22: note = chemically synthesized
  source 1..22: mol_type = other DNA
attctgttttgggatatttcct

SEQ ID NO: 55040 - DNA, 22 bp, synthetic construct
  misc_feature 1..22: note = chemically synthesized
  source 1..22: mol_type = other DNA
tgttttgggatatttcctagca

SEQ ID NO: 55041 - DNA, 22 bp, synthetic construct
  misc_feature 1..22: note = chemically synthesized
  source 1..22: mol_type = other DNA
ttttgggatatttcctagcaac

SEQ ID NO: 55042 - DNA, 22 bp, synthetic construct
  misc_feature 1..22: note = chemically synthesized
  source 1..22: mol_type = other DNA
tgggatatttcctagcaacatg

SEQ ID NO: 55043 - DNA, 22 bp, synthetic construct
  misc_feature 1..22: note = chemically synthesized
  source 1..22: mol_type = other DNA
gggatatttcctagcaacatga

SEQ ID NO: 55044 - DNA, 22 bp, synthetic construct
  misc_feature 1..22: note = chemically synthesized
  source 1..22: mol_type = other DNA
ggatatttcctagcaacatgag

SEQ ID NO: 55045 - DNA, 22 bp, synthetic construct
  misc_feature 1..22: note = chemically synthesized
  source 1..22: mol_type = other DNA
cctagcaacatgagctggggag

SEQ ID NO: 55046 - DNA, 22 bp, synthetic construct
  misc_feature 1..22: note = chemically synthesized
  source 1..22: mol_type = other DNA
ctagcaacatgagctggggagg

SEQ ID NO: 55047 - DNA, 22 bp, synthetic construct
  misc_feature 1..22: note = chemically synthesized
  source 1..22: mol_type = other DNA
gcaacatgagctggggagggga

SEQ ID NO: 55048 - DNA, 22 bp, synthetic construct
  misc_feature 1..22: note = chemically synthesized
  source 1..22: mol_type = other DNA
gggaggggatctcagcagtgat

SEQ ID NO: 55049 - DNA, 22 bp, synthetic construct
  misc_feature 1..22: note = chemically synthesized
  source 1..22: mol_type = other DNA
agcagtgatgctctatgaagca

SEQ ID NO: 55050 - DNA, 22 bp, synthetic construct
  misc_feature 1..22: note = chemically synthesized
  source 1..22: mol_type = other DNA
tatgaagcataataaaatgaca

SEQ ID NO: 55051 - DNA, 22 bp, synthetic construct
  misc_feature 1..22: note = chemically synthesized
  source 1..22: mol_type = other DNA
tgaagcataataaaatgacaca

SEQ ID NO: 55052 - DNA, 22 bp, synthetic construct
  misc_feature 1..22: note = chemically synthesized
  source 1..22: mol_type = other DNA
caggtaacttagttaaaggggg

SEQ ID NO: 55053 - DNA, 22 bp, synthetic construct
  misc_feature 1..22: note = chemically synthesized
  source 1..22: mol_type = other DNA
agttaaagggggaaataaatgg

SEQ ID NO: 55054 - DNA, 22 bp, synthetic construct
  misc_feature 1..22: note = chemically synthesized
  source 1..22: mol_type = other DNA
gttaaagggggaaataaatgga

SEQ ID NO: 55055 - DNA, 22 bp, synthetic construct
  misc_feature 1..22: note = chemically synthesized
  source 1..22: mol_type = other DNA
aagggggaaataaatggaagtt

SEQ ID NO: 55056 - DNA, 22 bp, synthetic construct
  misc_feature 1..22: note = chemically synthesized
  source 1..22: mol_type = other DNA
cctctttttgaatatcaattgt

SEQ ID NO: 55057 - DNA, 22 bp, synthetic construct
  misc_feature 1..22: note = chemically synthesized
  source 1..22: mol_type = other DNA
ctctttttgaatatcaattgta

SEQ ID NO: 55058 - DNA, 22 bp, synthetic construct
  misc_feature 1..22: note = chemically synthesized
  source 1..22: mol_type = other DNA
tttttgaatatcaattgtagcc

SEQ ID NO: 55059 - DNA, 22 bp, synthetic construct
  misc_feature 1..22: note = chemically synthesized
  source 1..22: mol_type = other DNA
tttgaatatcaattgtagcctg

SEQ ID NO: 55060 - DNA, 22 bp, synthetic construct
  misc_feature 1..22: note = chemically synthesized
  source 1..22: mol_type = other DNA
ttgaatatcaattgtagcctgc

SEQ ID NO: 55061 - DNA, 22 bp, synthetic construct
  misc_feature 1..22: note = chemically synthesized
  source 1..22: mol_type = other DNA
tgaatatcaattgtagcctgct

SEQ ID NO: 55062 - DNA, 22 bp, synthetic construct
  misc_feature 1..22: note = chemically synthesized
  source 1..22: mol_type = other DNA
gaatatcaattgtagcctgctc

SEQ ID NO: 55063 - DNA, 22 bp, synthetic construct
  misc_feature 1..22: note = chemically synthesized
  source 1..22: mol_type = other DNA
aatatcaattgtagcctgctct

SEQ ID NO: 55064 - DNA, 22 bp, synthetic construct
  misc_feature 1..22: note = chemically synthesized
  source 1..22: mol_type = other DNA
tagcctgctctgctacatttca

SEQ ID NO: 55065 - DNA, 22 bp, synthetic construct
  misc_feature 1..22: note = chemically synthesized
  source 1..22: mol_type = other DNA
ctctgctacatttcaaaaacac

SEQ ID NO: 55066 - DNA, 22 bp, synthetic construct
  misc_feature 1..22: note = chemically synthesized
  source 1..22: mol_type = other DNA
tgctacatttcaaaaacactct

SEQ ID NO: 55067 - DNA, 22 bp, synthetic construct
  misc_feature 1..22: note = chemically synthesized
  source 1..22: mol_type = other DNA
ctacatttcaaaaacactcttc

SEQ ID NO: 55068 - DNA, 22 bp, synthetic construct
  misc_feature 1..22: note = chemically synthesized
  source 1..22: mol_type = other DNA
catttcaaaaacactcttcaaa

SEQ ID NO: 55069 - DNA, 22 bp, synthetic construct
  misc_feature 1..22: note = chemically synthesized
  source 1..22: mol_type = other DNA
caaaaacactcttcaaaatgtt

SEQ ID NO: 55070 - DNA, 22 bp, synthetic construct
  misc_feature 1..22: note = chemically synthesized
  source 1..22: mol_type = other DNA
aaaaacactcttcaaaatgttt

SEQ ID NO: 55071 - DNA, 22 bp, synthetic construct
  misc_feature 1..22: note = chemically synthesized
  source 1..22: mol_type = other DNA
ttcaaaatgtttaactgaactc

SEQ ID NO: 55072 - DNA, 22 bp, synthetic construct
  misc_feature 1..22: note = chemically synthesized
  source 1..22: mol_type = other DNA
caaaatgtttaactgaactcac

SEQ ID NO: 55073 - DNA, 22 bp, synthetic construct
  misc_feature 1..22: note = chemically synthesized
  source 1..22: mol_type = other DNA
aaaatgtttaactgaactcact

SEQ ID NO: 55074 - DNA, 22 bp, synthetic construct
  misc_feature 1..22: note = chemically synthesized
  source 1..22: mol_type = other DNA
aactgaactcactgtaggaagc

SEQ ID NO: 55075 - DNA, 22 bp, synthetic construct
  misc_feature 1..22: note = chemically synthesized
  source 1..22: mol_type = other DNA
actgaactcactgtaggaagca

SEQ ID NO: 55076 - DNA, 22 bp, synthetic construct
  misc_feature 1..22: note = chemically synthesized
  source 1..22: mol_type = other DNA
aactcactgtaggaagcacctt

SEQ ID NO: 55077 - DNA, 22 bp, synthetic construct
  misc_feature 1..22: note = chemically synthesized
  source 1..22: mol_type = other DNA
actgtaggaagcaccttattaa

SEQ ID NO: 55078 - DNA, 22 bp, synthetic construct
  misc_feature 1..22: note = chemically synthesized
  source 1..22: mol_type = other DNA
taggaagcaccttattaattta

SEQ ID NO: 55079 - DNA, 22 bp, synthetic construct
  misc_feature 1..22: note = chemically synthesized
  source 1..22: mol_type = other DNA
attaatttattgtgtgttttga

SEQ ID NO: 55080 - DNA, 22 bp, synthetic construct
  misc_feature 1..22: note = chemically synthesized
  source 1..22: mol_type = other DNA
ttaatttattgtgtgttttgaa

SEQ ID NO: 55081 - DNA, 22 bp, synthetic construct
  misc_feature 1..22: note = chemically synthesized
  source 1..22: mol_type = other DNA
atttattgtgtgttttgaagtc

SEQ ID NO: 55082 - DNA, 22 bp, synthetic construct
  misc_feature 1..22: note = chemically synthesized
  source 1..22: mol_type = other DNA
attgtgtgttttgaagtcacac

SEQ ID NO: 55083 - DNA, 22 bp, synthetic construct
  misc_feature 1..22: note = chemically synthesized
  source 1..22: mol_type = other DNA
ttgtgtgttttgaagtcacact

SEQ ID NO: 55084 - DNA, 22 bp, synthetic construct
  misc_feature 1..22: note = chemically synthesized
  source 1..22: mol_type = other DNA
tgtgttttgaagtcacactgtg

SEQ ID NO: 55085 - DNA, 22 bp, synthetic construct
  misc_feature 1..22: note = chemically synthesized
  source 1..22: mol_type = other DNA
tgaagtcacactgtgagctata

SEQ ID NO: 55086 - DNA, 22 bp, synthetic construct
  misc_feature 1..22: note = chemically synthesized
  source 1..22: mol_type = other DNA
gaagtcacactgtgagctatag

SEQ ID NO: 55087 - DNA, 22 bp, synthetic construct
  misc_feature 1..22: note = chemically synthesized
  source 1..22: mol_type = other DNA
aagtcacactgtgagctataga

SEQ ID NO: 55088 - DNA, 22 bp, synthetic construct
  misc_feature 1..22: note = chemically synthesized
  source 1..22: mol_type = other DNA
tgagctatagaatttacccaag

SEQ ID NO: 55089 - DNA, 22 bp, synthetic construct
  misc_feature 1..22: note = chemically synthesized
  source 1..22: mol_type = other DNA
tagaatttacccaagcacaact

SEQ ID NO: 55090 - DNA, 22 bp, synthetic construct
  misc_feature 1..22: note = chemically synthesized
  source 1..22: mol_type = other DNA
acccaagcacaactcttcctgg

SEQ ID NO: 55091 - DNA, 22 bp, synthetic construct
  misc_feature 1..22: note = chemically synthesized
  source 1..22: mol_type = other DNA
cccaagcacaactcttcctgga

SEQ ID NO: 55092 - DNA, 22 bp, synthetic construct
  misc_feature 1..22: note = chemically synthesized
  source 1..22: mol_type = other DNA
ttcctggaaaagagagttcaaa

SEQ ID NO: 55093 - DNA, 22 bp, synthetic construct
  misc_feature 1..22: note = chemically synthesized
  source 1..22: mol_type = other DNA
cctggaaaagagagttcaaatg

SEQ ID NO: 55094 - DNA, 22 bp, synthetic construct
  misc_feature 1..22: note = chemically synthesized
  source 1..22: mol_type = other DNA
ctggaaaagagagttcaaatga

SEQ ID NO: 55095 - DNA, 22 bp, synthetic construct
  misc_feature 1..22: note = chemically synthesized
  source 1..22: mol_type = other DNA
gaaaagagagttcaaatgagaa

SEQ ID NO: 55096 - DNA, 22 bp, synthetic construct
  misc_feature 1..22: note = chemically synthesized
  source 1..22: mol_type = other DNA
aaatgagaaacagtgcggggtg

SEQ ID NO: 55097 - DNA, 22 bp, synthetic construct
  misc_feature 1..22: note = chemically synthesized
  source 1..22: mol_type = other DNA
aaatatctatttctcaatgata

SEQ ID NO: 55098 - DNA, 22 bp, synthetic construct
  misc_feature 1..22: note = chemically synthesized
  source 1..22: mol_type = other DNA
tttctcaatgatattttgatat

SEQ ID NO: 55099 - DNA, 22 bp, synthetic construct
  misc_feature 1..22: note = chemically synthesized
  source 1..22: mol_type = other DNA
ctcaatgatattttgatatatc

SEQ ID NO: 55100 - DNA, 22 bp, synthetic construct
  misc_feature 1..22: note = chemically synthesized
  source 1..22: mol_type = other DNA
tcaatgatattttgatatatct

SEQ ID NO: 55101 - DNA, 22 bp, synthetic construct
  misc_feature 1..22: note = chemically synthesized
  source 1..22: mol_type = other DNA
aatgatattttgatatatctat

SEQ ID NO: 55102 - DNA, 22 bp, synthetic construct
  misc_feature 1..22: note = chemically synthesized
  source 1..22: mol_type = other DNA
tgatatatctatcaagtgcttt

SEQ ID NO: 55103 - DNA, 22 bp, synthetic construct
  misc_feature 1..22: note = chemically synthesized
  source 1..22: mol_type = other DNA
gatatatctatcaagtgctttt

SEQ ID NO: 55104 - DNA, 22 bp, synthetic construct
  misc_feature 1..22: note = chemically synthesized
  source 1..22: mol_type = other DNA
atatatctatcaagtgcttttt

SEQ ID NO: 55105 - DNA, 22 bp, synthetic construct
  misc_feature 1..22: note = chemically synthesized
  source 1..22: mol_type = other DNA
tcaagtgctttttagtggatta

SEQ ID NO: 55106 - DNA, 22 bp, synthetic construct
  misc_feature 1..22: note = chemically synthesized
  source 1..22: mol_type = other DNA
tttagtggattaggttcagaat

SEQ ID NO: 55107 - DNA, 22 bp, synthetic construct
  misc_feature 1..22: note = chemically synthesized
  source 1..22: mol_type = other DNA
ttagtggattaggttcagaatg

SEQ ID NO: 55108 - DNA, 22 bp, synthetic construct
  misc_feature 1..22: note = chemically synthesized
  source 1..22: mol_type = other DNA
tagtggattaggttcagaatgc

SEQ ID NO: 55109 - DNA, 22 bp, synthetic construct
  misc_feature 1..22: note = chemically synthesized
  source 1..22: mol_type = other DNA
agtggattaggttcagaatgca

SEQ ID NO: 55110 - DNA, 22 bp, synthetic construct
  misc_feature 1..22: note = chemically synthesized
  source 1..22: mol_type = other DNA
gtggattaggttcagaatgcat

SEQ ID NO: 55111 - DNA, 22 bp, synthetic construct
  misc_feature 1..22: note = chemically synthesized
  source 1..22: mol_type = other DNA
ggttcagaatgcatcagccaat

SEQ ID NO: 55112 - DNA, 22 bp, synthetic construct
  misc_feature 1..22: note = chemically synthesized
  source 1..22: mol_type = other DNA
agaatgcatcagccaatgcctg

SEQ ID NO: 55113 - DNA, 22 bp, synthetic construct
  misc_feature 1..22: note = chemically synthesized
  source 1..22: mol_type = other DNA
ttcaataatccagttttccagc

SEQ ID NO: 55114 - DNA, 22 bp, synthetic construct
  misc_feature 1..22: note = chemically synthesized
  source 1..22: mol_type = other DNA
aataatccagttttccagcata

SEQ ID NO: 55115 - DNA, 22 bp, synthetic construct
  misc_feature 1..22: note = chemically synthesized
  source 1..22: mol_type = other DNA
tccagcatagagcatattaaat

SEQ ID NO: 55116 - DNA, 22 bp, synthetic construct
  misc_feature 1..22: note = chemically synthesized
  source 1..22: mol_type = other DNA
ccagcatagagcatattaaatt

SEQ ID NO: 55117 - DNA, 22 bp, synthetic construct
  misc_feature 1..22: note = chemically synthesized
  source 1..22: mol_type = other DNA
cagcatagagcatattaaattg

SEQ ID NO: 55118 - DNA, 22 bp, synthetic construct
  misc_feature 1..22: note = chemically synthesized
  source 1..22: mol_type = other DNA
aattgaggaaggacaaagtcac

SEQ ID NO: 55119 - DNA, 22 bp, synthetic construct
  misc_feature 1..22: note = chemically synthesized
  source 1..22: mol_type = other DNA
aggaaggacaaagtcacagagg

SEQ ID NO: 55120 - DNA, 22 bp, synthetic construct
  misc_feature 1..22: note = chemically synthesized
  source 1..22: mol_type = other DNA
tggccaaggactttgcatgaaa

SEQ ID NO: 55121 - DNA, 22 bp, synthetic construct
  misc_feature 1..22: note = chemically synthesized
  source 1..22: mol_type = other DNA
tgcatgaaacagtgagcgtgca

SEQ ID NO: 55122 - DNA, 22 bp, synthetic construct
  misc_feature 1..22: note = chemically synthesized
  source 1..22: mol_type = other DNA
gcatgaaacagtgagcgtgcat

SEQ ID NO: 55123 - DNA, 22 bp, synthetic construct
  misc_feature 1..22: note = chemically synthesized
  source 1..22: mol_type = other DNA
catgaaacagtgagcgtgcatc

SEQ ID NO: 55124 - DNA, 22 bp, synthetic construct
  misc_feature 1..22: note = chemically synthesized
  source 1..22: mol_type = other DNA
ctccttgccctgccctcatggt

SEQ ID NO: 55125 - DNA, 22 bp, synthetic construct
  misc_feature 1..22: note = chemically synthesized
  source 1..22: mol_type = other DNA
cttgccctgccctcatggtctg

SEQ ID NO: 55126 - DNA, 22 bp, synthetic construct
  misc_feature 1..22: note = chemically synthesized
  source 1..22: mol_type = other DNA
gccctgccctcatggtctgtgt

SEQ ID NO: 55127 - DNA, 22 bp, synthetic construct
  misc_feature 1..22: note = chemically synthesized
  source 1..22: mol_type = other DNA
ccctgccctcatggtctgtgta

SEQ ID NO: 55128 - DNA, 22 bp, synthetic construct
  misc_feature 1..22: note = chemically synthesized
  source 1..22: mol_type = other DNA
ccctcatggtctgtgtactctc

SEQ ID NO: 55129 - DNA, 22 bp, synthetic construct
  misc_feature 1..22: note = chemically synthesized
  source 1..22: mol_type = other DNA
atggtctgtgtactctcaggag

SEQ ID NO: 55130 - DNA, 22 bp, synthetic construct
  misc_feature 1..22: note = chemically synthesized
  source 1..22: mol_type = other DNA
tgtactctcaggaggtcaggac

SEQ ID NO: 55131 - DNA, 22 bp, synthetic construct
  misc_feature 1..22: note = chemically synthesized
  source 1..22: mol_type = other DNA
tcaggaggtcaggacaggcctt

SEQ ID NO: 55132 - DNA, 22 bp, synthetic construct
  misc_feature 1..22: note = chemically synthesized
  source 1..22: mol_type = other DNA
aggaggtcaggacaggcctttc

SEQ ID NO: 55133 - DNA, 22 bp, synthetic construct
  misc_feature 1..22: note = chemically synthesized
  source 1..22: mol_type = other DNA
tctgagaatgagaatctgttca

SEQ ID NO: 55134 - DNA, 22 bp, synthetic construct
  misc_feature 1..22: note = chemically synthesized
  source 1..22: mol_type = other DNA
ctgagaatgagaatctgttcat

SEQ ID NO: 55135 - DNA, 22 bp, synthetic construct
  misc_feature 1..22: note = chemically synthesized
  source 1..22: mol_type = other DNA
tgagaatgagaatctgttcatc

SEQ ID NO: 55136 - DNA, 22 bp, synthetic construct
  misc_feature 1..22: note = chemically synthesized
  source 1..22: mol_type = other DNA
agaatgagaatctgttcatctg

SEQ ID NO: 55137 - DNA, 22 bp, synthetic construct
  misc_feature 1..22: note = chemically synthesized
  source 1..22: mol_type = other DNA
ttcatctgcctttctactggat

SEQ ID NO: 55138 - DNA, 22 bp, synthetic construct
  misc_feature 1..22: note = chemically synthesized
  source 1..22: mol_type = other DNA
atctgcctttctactggatact

SEQ ID NO: 55139 - DNA, 22 bp, synthetic construct
  misc_feature 1..22: note = chemically synthesized
  source 1..22: mol_type = other DNA
cctttctactggatacttgtca

SEQ ID NO: 55140 - DNA, 22 bp, synthetic construct
  misc_feature 1..22: note = chemically synthesized
  source 1..22: mol_type = other DNA
tctactggatacttgtcatcgg

SEQ ID NO: 55141 - DNA, 22 bp, synthetic construct
  misc_feature 1..22: note = chemically synthesized
  source 1..22: mol_type = other DNA
ctactggatacttgtcatcggc

SEQ ID NO: 55142 - DNA, 22 bp, synthetic construct
  misc_feature 1..22: note = chemically synthesized
  source 1..22: mol_type = other DNA
tactggatacttgtcatcggca

SEQ ID NO: 55143 - DNA, 22 bp, synthetic construct
  misc_feature 1..22: note = chemically synthesized
  source 1..22: mol_type = other DNA
ctggatacttgtcatcggcata

SEQ ID NO: 55144 - DNA, 22 bp, synthetic construct
  misc_feature 1..22: note = chemically synthesized
  source 1..22: mol_type = other DNA
gatacttgtcatcggcatacaa

SEQ ID NO: 55145 - DNA, 22 bp, synthetic construct
  misc_feature 1..22: note = chemically synthesized
  source 1..22: mol_type = other DNA
gtcatcggcatacaaacacatg

SEQ ID NO: 55146 - DNA, 22 bp, synthetic construct
  misc_feature 1..22: note = chemically synthesized
  source 1..22: mol_type = other DNA
tcatcggcatacaaacacatgt

SEQ ID NO: 55147 - DNA, 22 bp, synthetic construct
  misc_feature 1..22: note = chemically synthesized
  source 1..22: mol_type = other DNA
tctgcagtgtgtcatctttcag

SEQ ID NO: 55148 - DNA, 22 bp, synthetic construct
  misc_feature 1..22: note = chemically synthesized
  source 1..22: mol_type = other DNA
tgcagtgtgtcatctttcagaa

SEQ ID NO: 55149 - DNA, 22 bp, synthetic construct
  misc_feature 1..22: note = chemically synthesized
  source 1..22: mol_type = other DNA
cagtgtgtcatctttcagaacc

SEQ ID NO: 55150 - DNA, 22 bp, synthetic construct
  misc_feature 1..22: note = chemically synthesized
  source 1..22: mol_type = other DNA
tcagaacctcccctgaccctgt

SEQ ID NO: 55151 - DNA, 22 bp, synthetic construct
  misc_feature 1..22: note = chemically synthesized
  source 1..22: mol_type = other DNA
cagaacctcccctgaccctgta

SEQ ID NO: 55152 - DNA, 22 bp, synthetic construct
  misc_feature 1..22: note = chemically synthesized
  source 1..22: mol_type = other DNA
agaacctcccctgaccctgtat

SEQ ID NO: 55153 - DNA, 22 bp, synthetic construct
  misc_feature 1..22: note = chemically synthesized
  source 1..22: mol_type = other DNA
ccctgaccctgtattccctaga

SEQ ID NO: 55154 - DNA, 22 bp, synthetic construct
  misc_feature 1..22: note = chemically synthesized
  source 1..22: mol_type = other DNA
accctgtattccctagaagtct

SEQ ID NO: 55155 - DNA, 22 bp, synthetic construct
  misc_feature 1..22: note = chemically synthesized
  source 1..22: mol_type = other DNA
tattccctagaagtctcgctgc

SEQ ID NO: 55156 - DNA, 22 bp, synthetic construct
  misc_feature 1..22: note = chemically synthesized
  source 1..22: mol_type = other DNA
cctagaagtctcgctgctttca

SEQ ID NO: 55157 - DNA, 22 bp, synthetic construct
  misc_feature 1..22: note = chemically synthesized
  source 1..22: mol_type = other DNA
gaagtctcgctgctttcagagc

SEQ ID NO: 55158 - DNA, 22 bp, synthetic construct
  misc_feature 1..22: note = chemically synthesized
  source 1..22: mol_type = other DNA
gctgctttcagagccaggcttc

SEQ ID NO: 55159 - DNA, 22 bp, synthetic construct
  misc_feature 1..22: note = chemically synthesized
  source 1..22: mol_type = other DNA
ctttcagagccaggcttctctc

SEQ ID NO: 55160 - DNA, 22 bp, synthetic construct
  misc_feature 1..22: note = chemically synthesized
  source 1..22: mol_type = other DNA
tcagagccaggcttctctcctg

SEQ ID NO: 55161 - DNA, 22 bp, synthetic construct
  misc_feature 1..22: note = chemically synthesized
  source 1..22: mol_type = other DNA
cagagccaggcttctctcctgc

SEQ ID NO: 55162 - DNA, 22 bp, synthetic construct
  misc_feature 1..22: note = chemically synthesized
  source 1..22: mol_type = other DNA
agagccaggcttctctcctgct

SEQ ID NO: 55163 - DNA, 22 bp, synthetic construct
  misc_feature 1..22: note = chemically synthesized
  source 1..22: mol_type = other DNA
ctctcctgctgccacccccact

SEQ ID NO: 55164 - DNA, 22 bp, synthetic construct
  misc_feature 1..22: note = chemically synthesized
  source 1..22: mol_type = other DNA
tctcctgctgccacccccactg

SEQ ID NO: 55165 - DNA, 22 bp, synthetic construct
  misc_feature 1..22: note = chemically synthesized
  source 1..22: mol_type = other DNA
tcctgctgccacccccactgct

SEQ ID NO: 55166 - DNA, 22 bp, synthetic construct
  misc_feature 1..22: note = chemically synthesized
  source 1..22: mol_type = other DNA
ctgctgccacccccactgctct

SEQ ID NO: 55167 - DNA, 22 bp, synthetic construct
  misc_feature 1..22: note = chemically synthesized
  source 1..22: mol_type = other DNA
ctgccacccccactgctcttct

SEQ ID NO: 55168 - DNA, 22 bp, synthetic construct
  misc_feature 1..22: note = chemically synthesized
  source 1..22: mol_type = other DNA
ccacccccactgctcttctagt

SEQ ID NO: 55169 - DNA, 22 bp, synthetic construct
  misc_feature 1..22: note = chemically synthesized
  source 1..22: mol_type = other DNA
ctcttctagtcactctttaacc

SEQ ID NO: 55170 - DNA, 22 bp, synthetic construct
  misc_feature 1..22: note = chemically synthesized
  source 1..22: mol_type = other DNA
ttctagtcactctttaacccac

SEQ ID NO: 55171 - DNA, 22 bp, synthetic construct
  misc_feature 1..22: note = chemically synthesized
  source 1..22: mol_type = other DNA
ctagtcactctttaacccactc

SEQ ID NO: 55172 - DNA, 22 bp, synthetic construct
  misc_feature 1..22: note = chemically synthesized
  source 1..22: mol_type = other DNA
tagtcactctttaacccactcc

SEQ ID NO: 55173 - DNA, 22 bp, synthetic construct
  misc_feature 1..22: note = chemically synthesized
  source 1..22: mol_type = other DNA
gtcactctttaacccactccat

SEQ ID NO: 55174 - DNA, 22 bp, synthetic construct
  misc_feature 1..22: note = chemically synthesized
  source 1..22: mol_type = other DNA
tttaacccactccatctgcatg

SEQ ID NO: 55175 - DNA, 22 bp, synthetic construct
  misc_feature 1..22: note = chemically synthesized
  source 1..22: mol_type = other DNA
taacccactccatctgcatgtg

SEQ ID NO: 55176 - DNA, 22 bp, synthetic construct
  misc_feature 1..22: note = chemically synthesized
  source 1..22: mol_type = other DNA
aacccactccatctgcatgtgg

SEQ ID NO: 55177 - DNA, 22 bp, synthetic construct
  misc_feature 1..22: note = chemically synthesized
  source 1..22: mol_type = other DNA
acccactccatctgcatgtggc

SEQ ID NO: 55178 - DNA, 22 bp, synthetic construct
  misc_feature 1..22: note = chemically synthesized
  source 1..22: mol_type = other DNA
catctgcatgtggcccccacca

SEQ ID NO: 55179 - DNA, 22 bp, synthetic construct
  misc_feature 1..22: note = chemically synthesized
  source 1..22: mol_type = other DNA
catgtggcccccaccacacccc

SEQ ID NO: 55180 - DNA, 22 bp, synthetic construct
  misc_feature 1..22: note = chemically synthesized
  source 1..22: mol_type = other DNA
aaagtggtcaaggttgtcctgt

SEQ ID NO: 55181 - DNA, 22 bp, synthetic construct
  misc_feature 1..22: note = chemically synthesized
  source 1..22: mol_type = other DNA
tcctgttgcttaattccatgga

SEQ ID NO: 55182 - DNA, 22 bp, synthetic construct
  misc_feature 1..22: note = chemically synthesized
  source 1..22: mol_type = other DNA
ttgcttaattccatggaagctt

SEQ ID NO: 55183 - DNA, 22 bp, synthetic construct
  misc_feature 1..22: note = chemically synthesized
  source 1..22: mol_type = other DNA
cttaattccatggaagcttggc

SEQ ID NO: 55184 - DNA, 22 bp, synthetic construct
  misc_feature 1..22: note = chemically synthesized
  source 1..22: mol_type = other DNA
aattccatggaagcttggctat

SEQ ID NO: 55185 - DNA, 22 bp, synthetic construct
  misc_feature 1..22: note = chemically synthesized
  source 1..22: mol_type = other DNA
attccatggaagcttggctatc

SEQ ID NO: 55186 - DNA, 22 bp, synthetic construct
  misc_feature 1..22: note = chemically synthesized
  source 1..22: mol_type = other DNA
catggaagcttggctatcttca

SEQ ID NO: 55187 - DNA, 22 bp, synthetic construct
  misc_feature 1..22: note = chemically synthesized
  source 1..22: mol_type = other DNA
ggctatcttcattttattagcc

SEQ ID NO: 55188 - DNA, 22 bp, synthetic construct
  misc_feature 1..22: note = chemically synthesized
  source 1..22: mol_type = other DNA
gctatcttcattttattagcct

SEQ ID NO: 55189 - DNA, 22 bp, synthetic construct
  misc_feature 1..22: note = chemically synthesized
  source 1..22: mol_type = other DNA
tcttcattttattagcctcttt

SEQ ID NO: 55190 - DNA, 22 bp, synthetic construct
  misc_feature 1..22: note = chemically synthesized
  source 1..22: mol_type = other DNA
cattttattagcctcttttggc

SEQ ID NO: 55191 - DNA, 22 bp, synthetic construct
  misc_feature 1..22: note = chemically synthesized
  source 1..22: mol_type = other DNA
attttattagcctcttttggcc

SEQ ID NO: 55192 - DNA, 22 bp, synthetic construct
  misc_feature 1..22: note = chemically synthesized
  source 1..22: mol_type = other DNA
tattagcctcttttggcctctc

SEQ ID NO: 55193 - DNA, 22 bp, synthetic construct
  misc_feature 1..22: note = chemically synthesized
  source 1..22: mol_type = other DNA
attagcctcttttggcctctca

SEQ ID NO: 55194 - DNA, 22 bp, synthetic construct
  misc_feature 1..22: note = chemically synthesized
  source 1..22: mol_type = other DNA
ttagcctcttttggcctctcac

SEQ ID NO: 55195 - DNA, 22 bp, synthetic construct
  misc_feature 1..22: note = chemically synthesized
  source 1..22: mol_type = other DNA
gcctcttttggcctctcaccct

SEQ ID NO: 55196 - DNA, 22 bp, synthetic construct
  misc_feature 1..22: note = chemically synthesized
  source 1..22: mol_type = other DNA
ttttggcctctcaccctgtgaa

SEQ ID NO: 55197 - DNA, 22 bp, synthetic construct
  misc_feature 1..22: note = chemically synthesized
  source 1..22: mol_type = other DNA
ttggcctctcaccctgtgaaaa

SEQ ID NO: 55198 - DNA, 22 bp, synthetic construct
  misc_feature 1..22: note = chemically synthesized
  source 1..22: mol_type = other DNA
tggcctctcaccctgtgaaaat

SEQ ID NO: 55199 - DNA, 22 bp, synthetic construct
  misc_feature 1..22: note = chemically synthesized
  source 1..22: mol_type = other DNA
ggcctctcaccctgtgaaaatc

SEQ ID NO: 55200 - DNA, 22 bp, synthetic construct
  misc_feature 1..22: note = chemically synthesized
  source 1..22: mol_type = other DNA
gcctctcaccctgtgaaaatca

SEQ ID NO: 55201 - DNA, 22 bp, synthetic construct
  misc_feature 1..22: note = chemically synthesized
  source 1..22: mol_type = other DNA
tcaccctgtgaaaatcactaca

SEQ ID NO: 55202 - DNA, 22 bp, synthetic construct
  misc_feature 1..22: note = chemically synthesized
  source 1..22: mol_type = other DNA
accctgtgaaaatcactacatt

SEQ ID NO: 55203 - DNA, 22 bp, synthetic construct
  misc_feature 1..22: note = chemically synthesized
  source 1..22: mol_type = other DNA
tgaaaatcactacattttgtgc

SEQ ID NO: 55204 - DNA, 22 bp, synthetic construct
  misc_feature 1..22: note = chemically synthesized
  source 1..22: mol_type = other DNA
cattttgtgccagagatggagc

SEQ ID NO: 55205 - DNA, 22 bp, synthetic construct
  misc_feature 1..22: note = chemically synthesized
  source 1..22: mol_type = other DNA
tgtgccagagatggagctggca

SEQ ID NO: 55206 - DNA, 22 bp, synthetic construct
  misc_feature 1..22: note = chemically synthesized
  source 1..22: mol_type = other DNA
gtgccagagatggagctggcat

SEQ ID NO: 55207 - DNA, 22 bp, synthetic construct
  misc_feature 1..22: note = chemically synthesized
  source 1..22: mol_type = other DNA
tgccagagatggagctggcatc

SEQ ID NO: 55208 - DNA, 22 bp, synthetic construct
  misc_feature 1..22: note = chemically synthesized
  source 1..22: mol_type = other DNA
gcatctccaggcttggaagagg

SEQ ID NO: 55209 - DNA, 22 bp, synthetic construct
  misc_feature 1..22: note = chemically synthesized
  source 1..22: mol_type = other DNA
caggcttggaagagggctgctg

SEQ ID NO: 55210 - DNA, 22 bp, synthetic construct
  misc_feature 1..22: note = chemically synthesized
  source 1..22: mol_type = other DNA
ggaagagggctgctgaagctca

SEQ ID NO: 55211 - DNA, 22 bp, synthetic construct
  misc_feature 1..22: note = chemically synthesized
  source 1..22: mol_type = other DNA
gaagagggctgctgaagctcag

SEQ ID NO: 55212 - DNA, 22 bp, synthetic construct
  misc_feature 1..22: note = chemically synthesized
  source 1..22: mol_type = other DNA
ctgaagctcagccaggtgtcct

SEQ ID NO: 55213 - DNA, 22 bp, synthetic construct
  misc_feature 1..22: note = chemically synthesized
  source 1..22: mol_type = other DNA
aagctcagccaggtgtcctaag

SEQ ID NO: 55214 - DNA, 22 bp, synthetic construct
  misc_feature 1..22: note = chemically synthesized
  source 1..22: mol_type = other DNA
agccaggtgtcctaaggagcct

SEQ ID NO: 55215 - DNA, 22 bp, synthetic construct
  misc_feature 1..22: note = chemically synthesized
  source 1..22: mol_type = other DNA
aggagcctcaggacaggggatg

SEQ ID NO: 55216 - DNA, 22 bp, synthetic construct
  misc_feature 1..22: note = chemically synthesized
  source 1..22: mol_type = other DNA
aggacaggggatgctcagtagc

SEQ ID NO: 55217 - DNA, 22 bp, synthetic construct
  misc_feature 1..22: note = chemically synthesized
  source 1..22: mol_type = other DNA
agtagccttgcaatgggaacac

SEQ ID NO: 55218 - DNA, 22 bp, synthetic construct
  misc_feature 1..22: note = chemically synthesized
  source 1..22: mol_type = other DNA
gcaatgggaacacagctgagcc

SEQ ID NO: 55219 - DNA, 22 bp, synthetic construct
  misc_feature 1..22: note = chemically synthesized
  source 1..22: mol_type = other DNA
caatgggaacacagctgagccc

SEQ ID NO: 55220 - DNA, 22 bp, synthetic construct
  misc_feature 1..22: note = chemically synthesized
  source 1..22: mol_type = other DNA
agccccacttggccaccctttg

SEQ ID NO: 55221 - DNA, 22 bp, synthetic construct
  misc_feature 1..22: note = chemically synthesized
  source 1..22: mol_type = other DNA
ggccaccctttgccacaaccag

SEQ ID NO: 55222 - DNA, 22 bp, synthetic construct
  misc_feature 1..22: note = chemically synthesized
  source 1..22: mol_type = other DNA
gccaccctttgccacaaccagg

SEQ ID NO: 55223 - DNA, 22 bp, synthetic construct
  misc_feature 1..22: note = chemically synthesized
  source 1..22: mol_type = other DNA
tgccacaaccaggcagaaagca

SEQ ID NO: 55224 - DNA, 22 bp, synthetic construct
  misc_feature 1..22: note = chemically synthesized
  source 1..22: mol_type = other DNA
gccacaaccaggcagaaagcag

SEQ ID NO: 55225 - DNA, 22 bp, synthetic construct
  misc_feature 1..22: note = chemically synthesized
  source 1..22: mol_type = other DNA
ccacaaccaggcagaaagcagc

SEQ ID NO: 55226 - DNA, 22 bp, synthetic construct
  misc_feature 1..22: note = chemically synthesized
  source 1..22: mol_type = other DNA
ttgaacagatttgttgcctcag

SEQ ID NO: 55227 - DNA, 22 bp, synthetic construct
  misc_feature 1..22: note = chemically synthesized
  source 1..22: mol_type = other DNA
tgaacagatttgttgcctcaga

SEQ ID NO: 55228 - DNA, 22 bp, synthetic construct
  misc_feature 1..22: note = chemically synthesized
  source 1..22: mol_type = other DNA
gaacagatttgttgcctcagat

SEQ ID NO: 55229 - DNA, 22 bp, synthetic construct
  misc_feature 1..22: note = chemically synthesized
  source 1..22: mol_type = other DNA
aacagatttgttgcctcagatt

SEQ ID NO: 55230 - DNA, 22 bp, synthetic construct
  misc_feature 1..22: note = chemically synthesized
  source 1..22: mol_type = other DNA
gttgcctcagatttgatctcaa

SEQ ID NO: 55231 - DNA, 22 bp, synthetic construct
  misc_feature 1..22: note = chemically synthesized
  source 1..22: mol_type = other DNA
ttgcctcagatttgatctcaaa

SEQ ID NO: 55232 - DNA, 22 bp, synthetic construct
  misc_feature 1..22: note = chemically synthesized
  source 1..22: mol_type = other DNA
cctcagatttgatctcaaagaa

SEQ ID NO: 55233 - DNA, 22 bp, synthetic construct
  misc_feature 1..22: note = chemically synthesized
  source 1..22: mol_type = other DNA
agatttgatctcaaagaaaaat

SEQ ID NO: 55234 - DNA, 22 bp, synthetic construct
  misc_feature 1..22: note = chemically synthesized
  source 1..22: mol_type = other DNA
gatctcaaagaaaaatcgtggg

SEQ ID NO: 55235 - DNA, 22 bp, synthetic construct
  misc_feature 1..22: note = chemically synthesized
  source 1..22: mol_type = other DNA
atctcaaagaaaaatcgtgggc

SEQ ID NO: 55236 - DNA, 22 bp, synthetic construct
  misc_feature 1..22: note = chemically synthesized
  source 1..22: mol_type = other DNA
aaagaaaaatcgtgggcagtat

SEQ ID NO: 55237 - DNA, 22 bp, synthetic construct
  misc_feature 1..22: note = chemically synthesized
  source 1..22: mol_type = other DNA
gtcccaggttctgcttttttac

SEQ ID NO: 55238 - DNA, 22 bp, synthetic construct
  misc_feature 1..22: note = chemically synthesized
  source 1..22: mol_type = other DNA
tgcttttttacaatttcctctg

SEQ ID NO: 55239 - DNA, 22 bp, synthetic construct
  misc_feature 1..22: note = chemically synthesized
  source 1..22: mol_type = other DNA
cttttttacaatttcctctgaa

SEQ ID NO: 55240 - DNA, 22 bp, synthetic construct
  misc_feature 1..22: note = chemically synthesized
  source 1..22: mol_type = other DNA
ttttacaatttcctctgaaatc

SEQ ID NO: 55241 - DNA, 22 bp, synthetic construct
  misc_feature 1..22: note = chemically synthesized
  source 1..22: mol_type = other DNA
tttacaatttcctctgaaatct

SEQ ID NO: 55242 - DNA, 22 bp, synthetic construct
  misc_feature 1..22: note = chemically synthesized
  source 1..22: mol_type = other DNA
ttacaatttcctctgaaatctg

SEQ ID NO: 55243 - DNA, 22 bp, synthetic construct
  misc_feature 1..22: note = chemically synthesized
  source 1..22: mol_type = other DNA
tacaatttcctctgaaatctgg

SEQ ID NO: 55244 - DNA, 22 bp, synthetic construct
  misc_feature 1..22: note = chemically synthesized
  source 1..22: mol_type = other DNA
acaatttcctctgaaatctgga

SEQ ID NO: 55245 - DNA, 22 bp, synthetic construct
  misc_feature 1..22: note = chemically synthesized
  source 1..22: mol_type = other DNA
caatttcctctgaaatctggat

SEQ ID NO: 55246 - DNA, 22 bp, synthetic construct
  misc_feature 1..22: note = chemically synthesized
  source 1..22: mol_type = other DNA
cctctgaaatctggatgcctat

SEQ ID NO: 55247 - DNA, 22 bp, synthetic construct
  misc_feature 1..22: note = chemically synthesized
  source 1..22: mol_type = other DNA
ctctgaaatctggatgcctatc

SEQ ID NO: 55248 - DNA, 22 bp, synthetic construct
  misc_feature 1..22: note = chemically synthesized
  source 1..22: mol_type = other DNA
tgaaatctggatgcctatcaac

SEQ ID NO: 55249 - DNA, 22 bp, synthetic construct
  misc_feature 1..22: note = chemically synthesized
  source 1..22: mol_type = other DNA
aaatctggatgcctatcaacac

SEQ ID NO: 55250 - DNA, 22 bp, synthetic construct
  misc_feature 1..22: note = chemically synthesized
  source 1..22: mol_type = other DNA
gatgcctatcaacaccttggaa

SEQ ID NO: 55251 - DNA, 22 bp, synthetic construct
  misc_feature 1..22: note = chemically synthesized
  source 1..22: mol_type = other DNA
tcaacaccttggaaaaactgaa

SEQ ID NO: 55252 - DNA, 22 bp, synthetic construct
  misc_feature 1..22: note = chemically synthesized
  source 1..22: mol_type = other DNA
ggaaaaactgaattctccccaa

SEQ ID NO: 55253 - DNA, 22 bp, synthetic construct
  misc_feature 1..22: note = chemically synthesized
  source 1..22: mol_type = other DNA
gaaaaactgaattctccccaac

SEQ ID NO: 55254 - DNA, 22 bp, synthetic construct
  misc_feature 1..22: note = chemically synthesized
  source 1..22: mol_type = other DNA
aattctccccaactaatagtgg

SEQ ID NO: 55255 - DNA, 22 bp, synthetic construct
  misc_feature 1..22: note = chemically synthesized
  source 1..22: mol_type = other DNA
tccccaactaatagtggtgtgt

SEQ ID NO: 55256 - DNA, 22 bp, synthetic construct
  misc_feature 1..22: note = chemically synthesized
  source 1..22: mol_type = other DNA
cccaactaatagtggtgtgtca

SEQ ID NO: 55257 - DNA, 22 bp, synthetic construct
  misc_feature 1..22: note = chemically synthesized
  source 1..22: mol_type = other DNA
atagtggtgtgtcactgtagta

SEQ ID NO: 55258 - DNA, 22 bp, synthetic construct
  misc_feature 1..22: note = chemically synthesized
  source 1..22: mol_type = other DNA
tagtaagcctagtacaaaaatg

SEQ ID NO: 55259 - DNA, 22 bp, synthetic construct
  misc_feature 1..22: note = chemically synthesized
  source 1..22: mol_type = other DNA
gtacaaaaatggccttctttgt

SEQ ID NO: 55260 - DNA, 22 bp, synthetic construct
  misc_feature 1..22: note = chemically synthesized
  source 1..22: mol_type = other DNA
ctttgtggaggagcttcatatc

SEQ ID NO: 55261 - DNA, 22 bp, synthetic construct
  misc_feature 1..22: note = chemically synthesized
  source 1..22: mol_type = other DNA
tttgtggaggagcttcatatcc

SEQ ID NO: 55262 - DNA, 22 bp, synthetic construct
  misc_feature 1..22: note = chemically synthesized
  source 1..22: mol_type = other DNA
tgtggaggagcttcatatcctc

SEQ ID NO: 55263 - DNA, 22 bp, synthetic construct
  misc_feature 1..22: note = chemically synthesized
  source 1..22: mol_type = other DNA
gtggaggagcttcatatcctcc

SEQ ID NO: 55264 - DNA, 22 bp, synthetic construct
  misc_feature 1..22: note = chemically synthesized
  source 1..22: mol_type = other DNA
tggaggagcttcatatcctcca

SEQ ID NO: 55265 - DNA, 22 bp, synthetic construct
  misc_feature 1..22: note = chemically synthesized
  source 1..22: mol_type = other DNA
catatcctccattttttttttg

SEQ ID NO: 55266 - DNA, 22 bp, synthetic construct
  misc_feature 1..22: note = chemically synthesized
  source 1..22: mol_type = other DNA
atatcctccattttttttttgc

SEQ ID NO: 55267 - DNA, 22 bp, synthetic construct
  misc_feature 1..22: note = chemically synthesized
  source 1..22: mol_type = other DNA
cattttttttttgcttaatttt

SEQ ID NO: 55268 - DNA, 22 bp, synthetic construct
  misc_feature 1..22: note = chemically synthesized
  source 1..22: mol_type = other DNA
tttttttgcttaatttttgccc

SEQ ID NO: 55269 - DNA, 22 bp, synthetic construct
  misc_feature 1..22: note = chemically synthesized
  source 1..22: mol_type = other DNA
ttttttgcttaatttttgccca

SEQ ID NO: 55270 - DNA, 22 bp, synthetic construct
  misc_feature 1..22: note = chemically synthesized
  source 1..22: mol_type = other DNA
tttttgcttaatttttgcccaa

SEQ ID NO: 55271 - DNA, 22 bp, synthetic construct
  misc_feature 1..22: note = chemically synthesized
  source 1..22: mol_type = other DNA
ttttgcttaatttttgcccaag

SEQ ID NO: 55272 - DNA, 22 bp, synthetic construct
  misc_feature 1..22: note = chemically synthesized
  source 1..22: mol_type = other DNA
tttgcttaatttttgcccaaga

SEQ ID NO: 55273 - DNA, 22 bp, synthetic construct
  misc_feature 1..22: note = chemically synthesized
  source 1..22: mol_type = other DNA
ttgcttaatttttgcccaagat

SEQ ID NO: 55274 - DNA, 22 bp, synthetic construct
  misc_feature 1..22: note = chemically synthesized
  source 1..22: mol_type = other DNA
tgcttaatttttgcccaagatg

SEQ ID NO: 55275 - DNA, 22 bp, synthetic construct
  misc_feature 1..22: note = chemically synthesized
  source 1..22: mol_type = other DNA
gcttaatttttgcccaagatga

SEQ ID NO: 55276 - DNA, 22 bp, synthetic construct
  misc_feature 1..22: note = chemically synthesized
  source 1..22: mol_type = other DNA
cttaatttttgcccaagatgag

SEQ ID NO: 55277 - DNA, 22 bp, synthetic construct
  misc_feature 1..22: note = chemically synthesized
  source 1..22: mol_type = other DNA
aatttttgcccaagatgagaac

SEQ ID NO: 55278 - DNA, 22 bp, synthetic construct
  misc_feature 1..22: note = chemically synthesized
  source 1..22: mol_type = other DNA
atttttgcccaagatgagaaca

SEQ ID NO: 55279 - DNA, 22 bp, synthetic construct
  misc_feature 1..22: note = chemically synthesized
  source 1..22: mol_type = other DNA
ttgcccaagatgagaacataat

SEQ ID NO: 55280 - DNA, 22 bp, synthetic construct
  misc_feature 1..22: note = chemically synthesized
  source 1..22: mol_type = other DNA
tgcccaagatgagaacataatt

SEQ ID NO: 55281 - DNA, 22 bp, synthetic construct
  misc_feature 1..22: note = chemically synthesized
  source 1..22: mol_type = other DNA
gcccaagatgagaacataattt

SEQ ID NO: 55282 - DNA, 22 bp, synthetic construct
  misc_feature 1..22: note = chemically synthesized
  source 1..22: mol_type = other DNA
cccaagatgagaacataattta

SEQ ID NO: 55283 - DNA, 22 bp, synthetic construct
  misc_feature 1..22: note = chemically synthesized
  source 1..22: mol_type = other DNA
agttcactttttatttattccc

SEQ ID NO: 55284 - DNA, 22 bp, synthetic construct
  misc_feature 1..22: note = chemically synthesized
  source 1..22: mol_type = other DNA
gttcactttttatttattccca

SEQ ID NO: 55285 - DNA, 22 bp, synthetic construct
  misc_feature 1..22: note = chemically synthesized
  source 1..22: mol_type = other DNA
actttttatttattcccaacat

SEQ ID NO: 55286 - DNA, 22 bp, synthetic construct
  misc_feature 1..22: note = chemically synthesized
  source 1..22: mol_type = other DNA
tttatttattcccaacatcatc

SEQ ID NO: 55287 - DNA, 22 bp, synthetic construct
  misc_feature 1..22: note = chemically synthesized
  source 1..22: mol_type = other DNA
ttatttattcccaacatcatcc

SEQ ID NO: 55288 - DNA, 22 bp, synthetic construct
  misc_feature 1..22: note = chemically synthesized
  source 1..22: mol_type = other DNA
tatttattcccaacatcatcca

SEQ ID NO: 55289 - DNA, 22 bp, synthetic construct
  misc_feature 1..22: note = chemically synthesized
  source 1..22: mol_type = other DNA
atttattcccaacatcatccat

SEQ ID NO: 55290 - DNA, 22 bp, synthetic construct
  misc_feature 1..22: note = chemically synthesized
  source 1..22: mol_type = other DNA
tttattcccaacatcatccatg

SEQ ID NO: 55291 - DNA, 22 bp, synthetic construct
  misc_feature 1..22: note = chemically synthesized
  source 1..22: mol_type = other DNA
attcccaacatcatccatgcac

SEQ ID NO: 55292 - DNA, 22 bp, synthetic construct
  misc_feature 1..22: note = chemically synthesized
  source 1..22: mol_type = other DNA
ttcccaacatcatccatgcacc

SEQ ID NO: 55293 - DNA, 22 bp, synthetic construct
  misc_feature 1..22: note = chemically synthesized
  source 1..22: mol_type = other DNA
ccaacatcatccatgcaccaac

SEQ ID NO: 55294 - DNA, 22 bp, synthetic construct
  misc_feature 1..22: note = chemically synthesized
  source 1..22: mol_type = other DNA
ttgtaactaaaggagggaccat

SEQ ID NO: 55295 - DNA, 22 bp, synthetic construct
  misc_feature 1..22: note = chemically synthesized
  source 1..22: mol_type = other DNA
tgtaactaaaggagggaccatt

SEQ ID NO: 55296 - DNA, 22 bp, synthetic construct
  misc_feature 1..22: note = chemically synthesized
  source 1..22: mol_type = other DNA
gtaactaaaggagggaccattc

SEQ ID NO: 55297 - DNA, 22 bp, synthetic construct
  misc_feature 1..22: note = chemically synthesized
  source 1..22: mol_type = other DNA
taactaaaggagggaccattca

SEQ ID NO: 55298 - DNA, 22 bp, synthetic construct
  misc_feature 1..22: note = chemically synthesized
  source 1..22: mol_type = other DNA
aaggagggaccattcagaagat

SEQ ID NO: 55299 - DNA, 22 bp, synthetic construct
  misc_feature 1..22: note = chemically synthesized
  source 1..22: mol_type = other DNA
agaagatgcttatcaactgtca

SEQ ID NO: 55300 - DNA, 22 bp, synthetic construct
  misc_feature 1..22: note = chemically synthesized
  source 1..22: mol_type = other DNA
atcaactgtcaaagtgacagtg

SEQ ID NO: 55301 - DNA, 22 bp, synthetic construct
  misc_feature 1..22: note = chemically synthesized
  source 1..22: mol_type = other DNA
tcaactgtcaaagtgacagtgt

SEQ ID NO: 55302 - DNA, 22 bp, synthetic construct
  misc_feature 1..22: note = chemically synthesized
  source 1..22: mol_type = other DNA
tcaaagtgacagtgttacaacc

SEQ ID NO: 55303 - DNA, 22 bp, synthetic construct
  misc_feature 1..22: note = chemically synthesized
  source 1..22: mol_type = other DNA
caaccaatgcacatattgtaag

SEQ ID NO: 55304 - DNA, 22 bp, synthetic construct
  misc_feature 1..22: note = chemically synthesized
  source 1..22: mol_type = other DNA
taagaaatcaaacaatggcctc

SEQ ID NO: 55305 - DNA, 22 bp, synthetic construct
  misc_feature 1..22: note = chemically synthesized
  source 1..22: mol_type = other DNA
caaggttcatttctacacaggg

SEQ ID NO: 55306 - DNA, 22 bp, synthetic construct
  misc_feature 1..22: note = chemically synthesized
  source 1..22: mol_type = other DNA
atttctacacagggattagcag

SEQ ID NO: 55307 - DNA, 22 bp, synthetic construct
  misc_feature 1..22: note = chemically synthesized
  source 1..22: mol_type = other DNA
ctacacagggattagcagatca

SEQ ID NO: 55308 - DNA, 22 bp, synthetic construct
  misc_feature 1..22: note = chemically synthesized
  source 1..22: mol_type = other DNA
tacacagggattagcagatcaa

SEQ ID NO: 55309 - DNA, 22 bp, synthetic construct
  misc_feature 1..22: note = chemically synthesized
  source 1..22: mol_type = other DNA
cacagggattagcagatcaaca

SEQ ID NO: 55310 - DNA, 22 bp, synthetic construct
  misc_feature 1..22: note = chemically synthesized
  source 1..22: mol_type = other DNA
gcagatcaacatcaatcttggc

SEQ ID NO: 55311 - DNA, 22 bp, synthetic construct
  misc_feature 1..22: note = chemically synthesized
  source 1..22: mol_type = other DNA
ggcaacacagttgccactgatg

SEQ ID NO: 55312 - DNA, 22 bp, synthetic construct
  misc_feature 1..22: note = chemically synthesized
  source 1..22: mol_type = other DNA
gcaacacagttgccactgatgg

SEQ ID NO: 55313 - DNA, 22 bp, synthetic construct
  misc_feature 1..22: note = chemically synthesized
  source 1..22: mol_type = other DNA
ccactgatggtgtcttattttt

SEQ ID NO: 55314 - DNA, 22 bp, synthetic construct
  misc_feature 1..22: note = chemically synthesized
  source 1..22: mol_type = other DNA
atggtgtcttattttttttatc

SEQ ID NO: 55315 - DNA, 22 bp, synthetic construct
  misc_feature 1..22: note = chemically synthesized
  source 1..22: mol_type = other DNA
attttttttatcatgacatggc

SEQ ID NO: 55316 - DNA, 22 bp, synthetic construct
  misc_feature 1..22: note = chemically synthesized
  source 1..22: mol_type = other DNA
ttttttttatcatgacatggca

SEQ ID NO: 55317 - DNA, 22 bp, synthetic construct
  misc_feature 1..22: note = chemically synthesized
  source 1..22: mol_type = other DNA
tttttatcatgacatggcaatc

SEQ ID NO: 55318 - DNA, 22 bp, synthetic construct
  misc_feature 1..22: note = chemically synthesized
  source 1..22: mol_type = other DNA
ttttatcatgacatggcaatca

SEQ ID NO: 55319 - DNA, 22 bp, synthetic construct
  misc_feature 1..22: note = chemically synthesized
  source 1..22: mol_type = other DNA
tttatcatgacatggcaatcaa

SEQ ID NO: 55320 - DNA, 22 bp, synthetic construct
  misc_feature 1..22: note = chemically synthesized
  source 1..22: mol_type = other DNA
ttatcatgacatggcaatcaag

SEQ ID NO: 55321 - DNA, 22 bp, synthetic construct
  misc_feature 1..22: note = chemically synthesized
  source 1..22: mol_type = other DNA
tatcatgacatggcaatcaaga

SEQ ID NO: 55322 - DNA, 22 bp, synthetic construct
  misc_feature 1..22: note = chemically synthesized
  source 1..22: mol_type = other DNA
atcatgacatggcaatcaagag

SEQ ID NO: 55323 - DNA, 22 bp, synthetic construct
  misc_feature 1..22: note = chemically synthesized
  source 1..22: mol_type = other DNA
tcatgacatggcaatcaagagc

SEQ ID NO: 55324 - DNA, 22 bp, synthetic construct
  misc_feature 1..22: note = chemically synthesized
  source 1..22: mol_type = other DNA
attcttatttaagattttatgg

SEQ ID NO: 55325 - DNA, 22 bp, synthetic construct
  misc_feature 1..22: note = chemically synthesized
  source 1..22: mol_type = other DNA
ttcttatttaagattttatggt

SEQ ID NO: 55326 - DNA, 22 bp, synthetic construct
  misc_feature 1..22: note = chemically synthesized
  source 1..22: mol_type = other DNA
ttatttaagattttatggttag

SEQ ID NO: 55327 - DNA, 22 bp, synthetic construct
  misc_feature 1..22: note = chemically synthesized
  source 1..22: mol_type = other DNA
atttaagattttatggttagac

SEQ ID NO: 55328 - DNA, 22 bp, synthetic construct
  misc_feature 1..22: note = chemically synthesized
  source 1..22: mol_type = other DNA
tttaagattttatggttagact

SEQ ID NO: 55329 - DNA, 22 bp, synthetic construct
  misc_feature 1..22: note = chemically synthesized
  source 1..22: mol_type = other DNA
aagattttatggttagactagg

SEQ ID NO: 55330 - DNA, 22 bp, synthetic construct
  misc_feature 1..22: note = chemically synthesized
  source 1..22: mol_type = other DNA
agattttatggttagactaggc

SEQ ID NO: 55331 - DNA, 22 bp, synthetic construct
  misc_feature 1..22: note = chemically synthesized
  source 1..22: mol_type = other DNA
tatggttagactaggcagatag

SEQ ID NO: 55332 - DNA, 22 bp, synthetic construct
  misc_feature 1..22: note = chemically synthesized
  source 1..22: mol_type = other DNA
atggttagactaggcagatagc

SEQ ID NO: 55333 - DNA, 22 bp, synthetic construct
  misc_feature 1..22: note = chemically synthesized
  source 1..22: mol_type = other DNA
tggttagactaggcagatagct

SEQ ID NO: 55334 - DNA, 22 bp, synthetic construct
  misc_feature 1..22: note = chemically synthesized
  source 1..22: mol_type = other DNA
gactaggcagatagctagatat

SEQ ID NO: 55335 - DNA, 22 bp, synthetic construct
  misc_feature 1..22: note = chemically synthesized
  source 1..22: mol_type = other DNA
ggcagatagctagatatgagca

SEQ ID NO: 55336 - DNA, 22 bp, synthetic construct
  misc_feature 1..22: note = chemically synthesized
  source 1..22: mol_type = other DNA
gatatgagcaggaggtggaagc

SEQ ID NO: 55337 - DNA, 22 bp, synthetic construct
  misc_feature 1..22: note = chemically synthesized
  source 1..22: mol_type = other DNA
agagaatggaggtctggagaat

SEQ ID NO: 55338 - DNA, 22 bp, synthetic construct
  misc_feature 1..22: note = chemically synthesized
  source 1..22: mol_type = other DNA
gagaatctgaaaccccagagat

SEQ ID NO: 55339 - DNA, 22 bp, synthetic construct
  misc_feature 1..22: note = chemically synthesized
  source 1..22: mol_type = other DNA
aaaccccagagattacccaagt

SEQ ID NO: 55340 - DNA, 22 bp, synthetic construct
  misc_feature 1..22: note = chemically synthesized
  source 1..22: mol_type = other DNA
cccaagtcctgcatgctagaca

SEQ ID NO: 55341 - DNA, 22 bp, synthetic construct
  misc_feature 1..22: note = chemically synthesized
  source 1..22: mol_type = other DNA
catgctagacatgagtggagga

SEQ ID NO: 55342 - DNA, 22 bp, synthetic construct
  misc_feature 1..22: note = chemically synthesized
  source 1..22: mol_type = other DNA
gacatgagtggaggagggggaa

SEQ ID NO: 55343 - DNA, 22 bp, synthetic construct
  misc_feature 1..22: note = chemically synthesized
  source 1..22: mol_type = other DNA
ggtagaaaagaatgccccttaa

SEQ ID NO: 55344 - DNA, 22 bp, synthetic construct
  misc_feature 1..22: note = chemically synthesized
  source 1..22: mol_type = other DNA
aagatgcccagcagtcgctcac

SEQ ID NO: 55345 - DNA, 22 bp, synthetic construct
  misc_feature 1..22: note = chemically synthesized
  source 1..22: mol_type = other DNA
agatgcccagcagtcgctcact

SEQ ID NO: 55346 - DNA, 22 bp, synthetic construct
  misc_feature 1..22: note = chemically synthesized
  source 1..22: mol_type = other DNA
actgtgcagttaacttttcaga

SEQ ID NO: 55347 - DNA, 22 bp, synthetic construct
  misc_feature 1..22: note = chemically synthesized
  source 1..22: mol_type = other DNA
tgcagttaacttttcagaatgc

SEQ ID NO: 55348 - DNA, 22 bp, synthetic construct
  misc_feature 1..22: note = chemically synthesized
  source 1..22: mol_type = other DNA
acttttcagaatgctgctagat

SEQ ID NO: 55349 - DNA, 22 bp, synthetic construct
  misc_feature 1..22: note = chemically synthesized
  source 1..22: mol_type = other DNA
ttcagaatgctgctagatacat

SEQ ID NO: 55350 - DNA, 22 bp, synthetic construct
  misc_feature 1..22: note = chemically synthesized
  source 1..22: mol_type = other DNA
tcagaatgctgctagatacatg

SEQ ID NO: 55351 - DNA, 22 bp, synthetic construct
  misc_feature 1..22: note = chemically synthesized
  source 1..22: mol_type = other DNA
cagaatgctgctagatacatgc

SEQ ID NO: 55352 - DNA, 22 bp, synthetic construct
  misc_feature 1..22: note = chemically synthesized
  source 1..22: mol_type = other DNA
agaatgctgctagatacatgct

SEQ ID NO: 55353 - DNA, 22 bp, synthetic construct
  misc_feature 1..22: note = chemically synthesized
  source 1..22: mol_type = other DNA
ctagatacatgctgatagggag

SEQ ID NO: 55354 - DNA, 22 bp, synthetic construct
  misc_feature 1..22: note = chemically synthesized
  source 1..22: mol_type = other DNA
gatacatgctgatagggaggga

SEQ ID NO: 55355 - DNA, 22 bp, synthetic construct
  misc_feature 1..22: note = chemically synthesized
  source 1..22: mol_type = other DNA
atagggagggaagagggcaaag

SEQ ID NO: 55356 - DNA, 22 bp, synthetic construct
  misc_feature 1..22: note = chemically synthesized
  source 1..22: mol_type = other DNA
ctaagagatacacggttgcagt

SEQ ID NO: 55357 - DNA, 22 bp, synthetic construct
  misc_feature 1..22: note = chemically synthesized
  source 1..22: mol_type = other DNA
agagatacacggttgcagttag

SEQ ID NO: 55358 - DNA, 22 bp, synthetic construct
  misc_feature 1..22: note = chemically synthesized
  source 1..22: mol_type = other DNA
cagttagtatacatctgagtgc

SEQ ID NO: 55359 - DNA, 22 bp, synthetic construct
  misc_feature 1..22: note = chemically synthesized
  source 1..22: mol_type = other DNA
gtatacatctgagtgctataca

SEQ ID NO: 55360 - DNA, 22 bp, synthetic construct
  misc_feature 1..22: note = chemically synthesized
  source 1..22: mol_type = other DNA
agtgctatacaaccttctttgg

SEQ ID NO: 55361 - DNA, 22 bp, synthetic construct
  misc_feature 1..22: note = chemically synthesized
  source 1..22: mol_type = other DNA
tacaaccttctttgggtggtgg

SEQ ID NO: 55362 - DNA, 22 bp, synthetic construct
  misc_feature 1..22: note = chemically synthesized
  source 1..22: mol_type = other DNA
ctttgggtggtggcaagaagca

SEQ ID NO: 55363 - DNA, 22 bp, synthetic construct
  misc_feature 1..22: note = chemically synthesized
  source 1..22: mol_type = other DNA
tttgggtggtggcaagaagcaa

SEQ ID NO: 55364 - DNA, 22 bp, synthetic construct
  misc_feature 1..22: note = chemically synthesized
  source 1..22: mol_type = other DNA
tgggtggtggcaagaagcaatg

SEQ ID NO: 55365 - DNA, 22 bp, synthetic construct
  misc_feature 1..22: note = chemically synthesized
  source 1..22: mol_type = other DNA
gggtggtggcaagaagcaatgc

SEQ ID NO: 55366 - DNA, 22 bp, synthetic construct
  misc_feature 1..22: note = chemically synthesized
  source 1..22: mol_type = other DNA
ggtggtggcaagaagcaatgca

SEQ ID NO: 55367 - DNA, 22 bp, synthetic construct
  misc_feature 1..22: note = chemically synthesized
  source 1..22: mol_type = other DNA
cgtagaattcatatcaaacacc

SEQ ID NO: 55368 - DNA, 22 bp, synthetic construct
  misc_feature 1..22: note = chemically synthesized
  source 1..22: mol_type = other DNA
atatcaaacacctgtatcacag

SEQ ID NO: 55369 - DNA, 22 bp, synthetic construct
  misc_feature 1..22: note = chemically synthesized
  source 1..22: mol_type = other DNA
tatcacaggtgttaaagaaaca

SEQ ID NO: 55370 - DNA, 22 bp, synthetic construct
  misc_feature 1..22: note = chemically synthesized
  source 1..22: mol_type = other DNA
aagaaacaagaaacattgtact

SEQ ID NO: 55371 - DNA, 22 bp, synthetic construct
  misc_feature 1..22: note = chemically synthesized
  source 1..22: mol_type = other DNA
tacttcttgtattcttaataat

SEQ ID NO: 55372 - DNA, 22 bp, synthetic construct
  misc_feature 1..22: note = chemically synthesized
  source 1..22: mol_type = other DNA
cttgtattcttaataatgattt

SEQ ID NO: 55373 - DNA, 22 bp, synthetic construct
  misc_feature 1..22: note = chemically synthesized
  source 1..22: mol_type = other DNA
ttgtattcttaataatgatttg

SEQ ID NO: 55374 - DNA, 22 bp, synthetic construct
  misc_feature 1..22: note = chemically synthesized
  source 1..22: mol_type = other DNA
gtattcttaataatgatttgca

SEQ ID NO: 55375 - DNA, 22 bp, synthetic construct
  misc_feature 1..22: note = chemically synthesized
  source 1..22: mol_type = other DNA
tattcttaataatgatttgcaa

SEQ ID NO: 55376 - DNA, 22 bp, synthetic construct
  misc_feature 1..22: note = chemically synthesized
  source 1..22: mol_type = other DNA
ttaataatgatttgcaatattg

SEQ ID NO: 55377 - DNA, 22 bp, synthetic construct
  misc_feature 1..22: note = chemically synthesized
  source 1..22: mol_type = other DNA
aataatgatttgcaatattgtc

SEQ ID NO: 55378 - DNA, 22 bp, synthetic construct
  misc_feature 1..22: note = chemically synthesized
  source 1..22: mol_type = other DNA
ataatgatttgcaatattgtct

SEQ ID NO: 55379 - DNA, 22 bp, synthetic construct
  misc_feature 1..22: note = chemically synthesized
  source 1..22: mol_type = other DNA
gcaatattgtctttagtatcac

SEQ ID NO: 55380 - DNA, 22 bp, synthetic construct
  misc_feature 1..22: note = chemically synthesized
  source 1..22: mol_type = other DNA
caatattgtctttagtatcact

SEQ ID NO: 55381 - DNA, 22 bp, synthetic construct
  misc_feature 1..22: note = chemically synthesized
  source 1..22: mol_type = other DNA
tctttagtatcactgcaaacct

SEQ ID NO: 55382 - DNA, 22 bp, synthetic construct
  misc_feature 1..22: note = chemically synthesized
  source 1..22: mol_type = other DNA
tagtatcactgcaaacctctat

SEQ ID NO: 55383 - DNA, 22 bp, synthetic construct
  misc_feature 1..22: note = chemically synthesized
  source 1..22: mol_type = other DNA
agtatcactgcaaacctctata

SEQ ID NO: 55384 - DNA, 22 bp, synthetic construct
  misc_feature 1..22: note = chemically synthesized
  source 1..22: mol_type = other DNA
gtatcactgcaaacctctataa

SEQ ID NO: 55385 - DNA, 22 bp, synthetic construct
  misc_feature 1..22: note = chemically synthesized
  source 1..22: mol_type = other DNA
caaacctctataaatatgattt

SEQ ID NO: 55386 - DNA, 22 bp, synthetic construct
  misc_feature 1..22: note = chemically synthesized
  source 1..22: mol_type = other DNA
tataaatatgatttttaaaaag

SEQ ID NO: 55387 - DNA, 22 bp, synthetic construct
  misc_feature 1..22: note = chemically synthesized
  source 1..22: mol_type = other DNA
taaatatgatttttaaaaagta

SEQ ID NO: 55388 - DNA, 22 bp, synthetic construct
  misc_feature 1..22: note = chemically synthesized
  source 1..22: mol_type = other DNA
ttaaaaagtatttctttaggtt

SEQ ID NO: 55389 - DNA, 22 bp, synthetic construct
  misc_feature 1..22: note = chemically synthesized
  source 1..22: mol_type = other DNA
taaaaagtatttctttaggttg

SEQ ID NO: 55390 - DNA, 22 bp, synthetic construct
  misc_feature 1..22: note = chemically synthesized
  source 1..22: mol_type = other DNA
aaaaagtatttctttaggttgg

SEQ ID NO: 55391 - DNA, 22 bp, synthetic construct
  misc_feature 1..22: note = chemically synthesized
  source 1..22: mol_type = other DNA
aaaagtatttctttaggttgga

SEQ ID NO: 55392 - DNA, 22 bp, synthetic construct
  misc_feature 1..22: note = chemically synthesized
  source 1..22: mol_type = other DNA
ctttaggttggaattacttcta

SEQ ID NO: 55393 - DNA, 22 bp, synthetic construct
  misc_feature 1..22: note = chemically synthesized
  source 1..22: mol_type = other DNA
tttaggttggaattacttctac

SEQ ID NO: 55394 - DNA, 22 bp, synthetic construct
  misc_feature 1..22: note = chemically synthesized
  source 1..22: mol_type = other DNA
taggttggaattacttctacgc

SEQ ID NO: 55395 - DNA, 22 bp, synthetic construct
  misc_feature 1..22: note = chemically synthesized
  source 1..22: mol_type = other DNA
aggttggaattacttctacgca

SEQ ID NO: 55396 - DNA, 22 bp, synthetic construct
  misc_feature 1..22: note = chemically synthesized
  source 1..22: mol_type = other DNA
ggttggaattacttctacgcat

SEQ ID NO: 55397 - DNA, 22 bp, synthetic construct
  misc_feature 1..22: note = chemically synthesized
  source 1..22: mol_type = other DNA
gaattacttctacgcattgact

SEQ ID NO: 55398 - DNA, 22 bp, synthetic construct
  misc_feature 1..22: note = chemically synthesized
  source 1..22: mol_type = other DNA
cttctacgcattgacttatctt

SEQ ID NO: 55399 - DNA, 22 bp, synthetic construct
  misc_feature 1..22: note = chemically synthesized
  source 1..22: mol_type = other DNA
ctacgcattgacttatcttcct

SEQ ID NO: 55400 - DNA, 22 bp, synthetic construct
  misc_feature 1..22: note = chemically synthesized
  source 1..22: mol_type = other DNA
tacgcattgacttatcttcctg

SEQ ID NO: 55401 - DNA, 22 bp, synthetic construct
  misc_feature 1..22: note = chemically synthesized
  source 1..22: mol_type = other DNA
cgcattgacttatcttcctggg

SEQ ID NO: 55402 - DNA, 22 bp, synthetic construct
  misc_feature 1..22: note = chemically synthesized
  source 1..22: mol_type = other DNA
acttatcttcctgggtttcatt

SEQ ID NO: 55403 - DNA, 22 bp, synthetic construct
  misc_feature 1..22: note = chemically synthesized
  source 1..22: mol_type = other DNA
atcttcctgggtttcattagcc

SEQ ID NO: 55404 - DNA, 22 bp, synthetic construct
  misc_feature 1..22: note = chemically synthesized
  source 1..22: mol_type = other DNA
tcttcctgggtttcattagccg

SEQ ID NO: 55405 - DNA, 22 bp, synthetic construct
  misc_feature 1..22: note = chemically synthesized
  source 1..22: mol_type = other DNA
cctgggtttcattagccgtacc

SEQ ID NO: 55406 - DNA, 22 bp, synthetic construct
  misc_feature 1..22: note = chemically synthesized
  source 1..22: mol_type = other DNA
ctgggtttcattagccgtaccc

SEQ ID NO: 55407 - DNA, 22 bp, synthetic construct
  misc_feature 1..22: note = chemically synthesized
  source 1..22: mol_type = other DNA
ggtttcattagccgtacccgtt

SEQ ID NO: 55408 - DNA, 22 bp, synthetic construct
  misc_feature 1..22: note = chemically synthesized
  source 1..22: mol_type = other DNA
cattagccgtacccgttgtact

SEQ ID NO: 55409 - DNA, 22 bp, synthetic construct
  misc_feature 1..22: note = chemically synthesized
  source 1..22: mol_type = other DNA
attagccgtacccgttgtactt

SEQ ID NO: 55410 - DNA, 22 bp, synthetic construct
  misc_feature 1..22: note = chemically synthesized
  source 1..22: mol_type = other DNA
gccgtacccgttgtactttctt

SEQ ID NO: 55411 - DNA, 22 bp, synthetic construct
  misc_feature 1..22: note = chemically synthesized
  source 1..22: mol_type = other DNA
tactttcttccttaccactgtt

SEQ ID NO: 55412 - DNA, 22 bp, synthetic construct
  misc_feature 1..22: note = chemically synthesized
  source 1..22: mol_type = other DNA
tcttccttaccactgtttatct

SEQ ID NO: 55413 - DNA, 22 bp, synthetic construct
  misc_feature 1..22: note = chemically synthesized
  source 1..22: mol_type = other DNA
cttccttaccactgtttatctc

SEQ ID NO: 55414 - DNA, 22 bp, synthetic construct
  misc_feature 1..22: note = chemically synthesized
  source 1..22: mol_type = other DNA
ttccttaccactgtttatctca

SEQ ID NO: 55415 - DNA, 22 bp, synthetic construct
  misc_feature 1..22: note = chemically synthesized
  source 1..22: mol_type = other DNA
ccttaccactgtttatctcaaa

SEQ ID NO: 55416 - DNA, 22 bp, synthetic construct
  misc_feature 1..22: note = chemically synthesized
  source 1..22: mol_type = other DNA
cttaccactgtttatctcaaac

SEQ ID NO: 55417 - DNA, 22 bp, synthetic construct
  misc_feature 1..22: note = chemically synthesized
  source 1..22: mol_type = other DNA
accactgtttatctcaaactct

SEQ ID NO: 55418 - DNA, 22 bp, synthetic construct
  misc_feature 1..22: note = chemically synthesized
  source 1..22: mol_type = other DNA
ccactgtttatctcaaactctt

SEQ ID NO: 55419 - DNA, 22 bp, synthetic construct
  misc_feature 1..22: note = chemically synthesized
  source 1..22: mol_type = other DNA
tttatctcaaactcttgagatt

SEQ ID NO: 55420 - DNA, 22 bp, synthetic construct
  misc_feature 1..22: note = chemically synthesized
  source 1..22: mol_type = other DNA
atctcaaactcttgagattaaa

SEQ ID NO: 55421 - DNA, 22 bp, synthetic construct
  misc_feature 1..22: note = chemically synthesized
  source 1..22: mol_type = other DNA
tctcaaactcttgagattaaag

SEQ ID NO: 55422 - DNA, 22 bp, synthetic construct
  misc_feature 1..22: note = chemically synthesized
  source 1..22: mol_type = other DNA
aaactcttgagattaaagtatg

SEQ ID NO: 55423 - DNA, 22 bp, synthetic construct
  misc_feature 1..22: note = chemically synthesized
  source 1..22: mol_type = other DNA
ttgagattaaagtatgggctca

SEQ ID NO: 55424 - DNA, 22 bp, synthetic construct
  misc_feature 1..22: note = chemically synthesized
  source 1..22: mol_type = other DNA
gagattaaagtatgggctcagg

SEQ ID NO: 55425 - DNA, 22 bp, synthetic construct
  misc_feature 1..22: note = chemically synthesized
  source 1..22: mol_type = other DNA
agattaaagtatgggctcagga

SEQ ID NO: 55426 - DNA, 22 bp, synthetic construct
  misc_feature 1..22: note = chemically synthesized
  source 1..22: mol_type = other DNA
aagtatgggctcaggagggagc

SEQ ID NO: 55427 - DNA, 22 bp, synthetic construct
  misc_feature 1..22: note = chemically synthesized
  source 1..22: mol_type = other DNA
aggagggagcgaggagcttcag

SEQ ID NO: 55428 - DNA, 22 bp, synthetic construct
  misc_feature 1..22: note = chemically synthesized
  source 1..22: mol_type = other DNA
caggactctcacggacctccag

SEQ ID NO: 55429 - DNA, 22 bp, synthetic construct
  misc_feature 1..22: note = chemically synthesized
  source 1..22: mol_type = other DNA
aggactctcacggacctccagc

SEQ ID NO: 55430 - DNA, 22 bp, synthetic construct
  misc_feature 1..22: note = chemically synthesized
  source 1..22: mol_type = other DNA
tcacggacctccagcacagtgt

SEQ ID NO: 55431 - DNA, 22 bp, synthetic construct
  misc_feature 1..22: note = chemically synthesized
  source 1..22: mol_type = other DNA
acggacctccagcacagtgtag

SEQ ID NO: 55432 - DNA, 22 bp, synthetic construct
  misc_feature 1..22: note = chemically synthesized
  source 1..22: mol_type = other DNA
cagcacagtgtagctgccttat

SEQ ID NO: 55433 - DNA, 22 bp, synthetic construct
  misc_feature 1..22: note = chemically synthesized
  source 1..22: mol_type = other DNA
ccttatggaaaagtggccacac

SEQ ID NO: 55434 - DNA, 22 bp, synthetic construct
  misc_feature 1..22: note = chemically synthesized
  source 1..22: mol_type = other DNA
atggaaaagtggccacactgtt

SEQ ID NO: 55435 - DNA, 22 bp, synthetic construct
  misc_feature 1..22: note = chemically synthesized
  source 1..22: mol_type = other DNA
tggaaaagtggccacactgttt

SEQ ID NO: 55436 - DNA, 22 bp, synthetic construct
  misc_feature 1..22: note = chemically synthesized
  source 1..22: mol_type = other DNA
ttttctgcactggtccctgccc

SEQ ID NO: 55437 - DNA, 22 bp, synthetic construct
  misc_feature 1..22: note = chemically synthesized
  source 1..22: mol_type = other DNA
tctgcactggtccctgccccta

SEQ ID NO: 55438 - DNA, 22 bp, synthetic construct
  misc_feature 1..22: note = chemically synthesized
  source 1..22: mol_type = other DNA
ctgcactggtccctgcccctac

SEQ ID NO: 55439 - DNA, 22 bp, synthetic construct
  misc_feature 1..22: note = chemically synthesized
  source 1..22: mol_type = other DNA
tgcactggtccctgcccctact

SEQ ID NO: 55440 - DNA, 22 bp, synthetic construct
  misc_feature 1..22: note = chemically synthesized
  source 1..22: mol_type = other DNA
cactggtccctgcccctactat

SEQ ID NO: 55441 - DNA, 22 bp, synthetic construct
  misc_feature 1..22: note = chemically synthesized
  source 1..22: mol_type = other DNA
gtccctgcccctactattcctc

SEQ ID NO: 55442 - DNA, 22 bp, synthetic construct
  misc_feature 1..22: note = chemically synthesized
  source 1..22: mol_type = other DNA
cccctactattcctcactgggc

SEQ ID NO: 55443 - DNA, 22 bp, synthetic construct
  misc_feature 1..22: note = chemically synthesized
  source 1..22: mol_type = other DNA
ctattcctcactgggcagagca

SEQ ID NO: 55444 - DNA, 22 bp, synthetic construct
  misc_feature 1..22: note = chemically synthesized
  source 1..22: mol_type = other DNA
ttcctcactgggcagagcacag

SEQ ID NO: 55445 - DNA, 22 bp, synthetic construct
  misc_feature 1..22: note = chemically synthesized
  source 1..22: mol_type = other DNA
ctcactgggcagagcacagcca

SEQ ID NO: 55446 - DNA, 22 bp, synthetic construct
  misc_feature 1..22: note = chemically synthesized
  source 1..22: mol_type = other DNA
actgggcagagcacagccaccc

SEQ ID NO: 55447 - DNA, 22 bp, synthetic construct
  misc_feature 1..22: note = chemically synthesized
  source 1..22: mol_type = other DNA
ggcagagcacagccaccctggc

SEQ ID NO: 55448 - DNA, 22 bp, synthetic construct
  misc_feature 1..22: note = chemically synthesized
  source 1..22: mol_type = other DNA
gccctgcctgaacattttagtc

SEQ ID NO: 55449 - DNA, 22 bp, synthetic construct
  misc_feature 1..22: note = chemically synthesized
  source 1..22: mol_type = other DNA
cctgaacattttagtcagtgtt

SEQ ID NO: 55450 - DNA, 22 bp, synthetic construct
  misc_feature 1..22: note = chemically synthesized
  source 1..22: mol_type = other DNA
aacattttagtcagtgttggct

SEQ ID NO: 55451 - DNA, 22 bp, synthetic construct
  misc_feature 1..22: note = chemically synthesized
  source 1..22: mol_type = other DNA
tagtcagtgttggctctgtgct

SEQ ID NO: 55452 - DNA, 22 bp, synthetic construct
  misc_feature 1..22: note = chemically synthesized
  source 1..22: mol_type = other DNA
agtcagtgttggctctgtgctt

SEQ ID NO: 55453 - DNA, 22 bp, synthetic construct
  misc_feature 1..22: note = chemically synthesized
  source 1..22: mol_type = other DNA
gtcagtgttggctctgtgcttc

SEQ ID NO: 55454 - DNA, 22 bp, synthetic construct
  misc_feature 1..22: note = chemically synthesized
  source 1..22: mol_type = other DNA
gctctgtgcttctctggggagg

SEQ ID NO: 55455 - DNA, 22 bp, synthetic construct
  misc_feature 1..22: note = chemically synthesized
  source 1..22: mol_type = other DNA
tgtgcttctctggggaggaaat

SEQ ID NO: 55456 - DNA, 22 bp, synthetic construct
  misc_feature 1..22: note = chemically synthesized
  source 1..22: mol_type = other DNA
tgcttctctggggaggaaatcc

SEQ ID NO: 55457 - DNA, 22 bp, synthetic construct
  misc_feature 1..22: note = chemically synthesized
  source 1..22: mol_type = other DNA
ctctggggaggaaatccaagag

SEQ ID NO: 55458 - DNA, 22 bp, synthetic construct
  misc_feature 1..22: note = chemically synthesized
  source 1..22: mol_type = other DNA
tctggggaggaaatccaagaga

SEQ ID NO: 55459 - DNA, 22 bp, synthetic construct
  misc_feature 1..22: note = chemically synthesized
  source 1..22: mol_type = other DNA
tggggaggaaatccaagagaca

SEQ ID NO: 55460 - DNA, 22 bp, synthetic construct
  misc_feature 1..22: note = chemically synthesized
  source 1..22: mol_type = other DNA
gggaggaaatccaagagacaac

SEQ ID NO: 55461 - DNA, 22 bp, synthetic construct
  misc_feature 1..22: note = chemically synthesized
  source 1..22: mol_type = other DNA
tgccatttcagctgcagcagta

SEQ ID NO: 55462 - DNA, 22 bp, synthetic construct
  misc_feature 1..22: note = chemically synthesized
  source 1..22: mol_type = other DNA
ccatttcagctgcagcagtacc

SEQ ID NO: 55463 - DNA, 22 bp, synthetic construct
  misc_feature 1..22: note = chemically synthesized
  source 1..22: mol_type = other DNA
cagctgcagcagtaccaccgtt

SEQ ID NO: 55464 - DNA, 22 bp, synthetic construct
  misc_feature 1..22: note = chemically synthesized
  source 1..22: mol_type = other DNA
agctgcagcagtaccaccgtta

SEQ ID NO: 55465 - DNA, 22 bp, synthetic construct
  misc_feature 1..22: note = chemically synthesized
  source 1..22: mol_type = other DNA
cagcagtaccaccgttaatgcc

SEQ ID NO: 55466 - DNA, 22 bp, synthetic construct
  misc_feature 1..22: note = chemically synthesized
  source 1..22: mol_type = other DNA
atgcccttgggcttgagaaaga

SEQ ID NO: 55467 - DNA, 22 bp, synthetic construct
  misc_feature 1..22: note = chemically synthesized
  source 1..22: mol_type = other DNA
gggcttgagaaagaagggacct

SEQ ID NO: 55468 - DNA, 22 bp, synthetic construct
  misc_feature 1..22: note = chemically synthesized
  source 1..22: mol_type = other DNA
ggcttgagaaagaagggacctg

SEQ ID NO: 55469 - DNA, 22 bp, synthetic construct
  misc_feature 1..22: note = chemically synthesized
  source 1..22: mol_type = other DNA
gagaaagaagggacctggccac

SEQ ID NO: 55470 - DNA, 22 bp, synthetic construct
  misc_feature 1..22: note = chemically synthesized
  source 1..22: mol_type = other DNA
agaaagaagggacctggccact

SEQ ID NO: 55471 - DNA, 22 bp, synthetic construct
  misc_feature 1..22: note = chemically synthesized
  source 1..22: mol_type = other DNA
gccacttccctgacacctccag

SEQ ID NO: 55472 - DNA, 22 bp, synthetic construct
  misc_feature 1..22: note = chemically synthesized
  source 1..22: mol_type = other DNA
ccctgacacctccagcacacag

SEQ ID NO: 55473 - DNA, 22 bp, synthetic construct
  misc_feature 1..22: note = chemically synthesized
  source 1..22: mol_type = other DNA
cctgacacctccagcacacagc

SEQ ID NO: 55474 - DNA, 22 bp, synthetic construct
  misc_feature 1..22: note = chemically synthesized
  source 1..22: mol_type = other DNA
acacctccagcacacagcaggg

SEQ ID NO: 55475 - DNA, 22 bp, synthetic construct
  misc_feature 1..22: note = chemically synthesized
  source 1..22: mol_type = other DNA
cagcacacagcagggaaagaat

SEQ ID NO: 55476 - DNA, 22 bp, synthetic construct
  misc_feature 1..22: note = chemically synthesized
  source 1..22: mol_type = other DNA
cagtttctctttcttgtgagct

SEQ ID NO: 55477 - DNA, 22 bp, synthetic construct
  misc_feature 1..22: note = chemically synthesized
  source 1..22: mol_type = other DNA
ctctttcttgtgagctttcacc

SEQ ID NO: 55478 - DNA, 22 bp, synthetic construct
  misc_feature 1..22: note = chemically synthesized
  source 1..22: mol_type = other DNA
tctttcttgtgagctttcacct

SEQ ID NO: 55479 - DNA, 22 bp, synthetic construct
  misc_feature 1..22: note = chemically synthesized
  source 1..22: mol_type = other DNA
tttcttgtgagctttcacctgc

SEQ ID NO: 55480 - DNA, 22 bp, synthetic construct
  misc_feature 1..22: note = chemically synthesized
  source 1..22: mol_type = other DNA
tcttgtgagctttcacctgcta

SEQ ID NO: 55481 - DNA, 22 bp, synthetic construct
  misc_feature 1..22: note = chemically synthesized
  source 1..22: mol_type = other DNA
cttgtgagctttcacctgctac

SEQ ID NO: 55482 - DNA, 22 bp, synthetic construct
  misc_feature 1..22: note = chemically synthesized
  source 1..22: mol_type = other DNA
ttgtgagctttcacctgctact

SEQ ID NO: 55483 - DNA, 22 bp, synthetic construct
  misc_feature 1..22: note = chemically synthesized
  source 1..22: mol_type = other DNA
gtgagctttcacctgctactct

SEQ ID NO: 55484 - DNA, 22 bp, synthetic construct
  misc_feature 1..22: note = chemically synthesized
  source 1..22: mol_type = other DNA
tgagctttcacctgctactctt

SEQ ID NO: 55485 - DNA, 22 bp, synthetic construct
  misc_feature 1..22: note = chemically synthesized
  source 1..22: mol_type = other DNA
tcacctgctactcttcaccagg

SEQ ID NO: 55486 - DNA, 22 bp, synthetic construct
  misc_feature 1..22: note = chemically synthesized
  source 1..22: mol_type = other DNA
cacctgctactcttcaccaggc

SEQ ID NO: 55487 - DNA, 22 bp, synthetic construct
  misc_feature 1..22: note = chemically synthesized
  source 1..22: mol_type = other DNA
acctgctactcttcaccaggca

SEQ ID NO: 55488 - DNA, 22 bp, synthetic construct
  misc_feature 1..22: note = chemically synthesized
  source 1..22: mol_type = other DNA
ctactcttcaccaggcaaggct

SEQ ID NO: 55489 - DNA, 22 bp, synthetic construct
  misc_feature 1..22: note = chemically synthesized
  source 1..22: mol_type = other DNA
ctcttcaccaggcaaggctcct

SEQ ID NO: 55490 - DNA, 22 bp, synthetic construct
  misc_feature 1..22: note = chemically synthesized
  source 1..22: mol_type = other DNA
ttcaccaggcaaggctcctggc

SEQ ID NO: 55491 - DNA, 22 bp, synthetic construct
  misc_feature 1..22: note = chemically synthesized
  source 1..22: mol_type = other DNA
caccaggcaaggctcctggctt

SEQ ID NO: 55492 - DNA, 22 bp, synthetic construct
  misc_feature 1..22: note = chemically synthesized
  source 1..22: mol_type = other DNA
accaggcaaggctcctggcttg

SEQ ID NO: 55493 - DNA, 22 bp, synthetic construct
  misc_feature 1..22: note = chemically synthesized
  source 1..22: mol_type = other DNA
ctggcttgggcccacagtgcag

SEQ ID NO: 55494 - DNA, 22 bp, synthetic construct
  misc_feature 1..22: note = chemically synthesized
  source 1..22: mol_type = other DNA
gcttgggcccacagtgcaggca

SEQ ID NO: 55495 - DNA, 22 bp, synthetic construct
  misc_feature 1..22: note = chemically synthesized
  source 1..22: mol_type = other DNA
gggcccacagtgcaggcacctc

SEQ ID NO: 55496 - DNA, 22 bp, synthetic construct
  misc_feature 1..22: note = chemically synthesized
  source 1..22: mol_type = other DNA
ggcccacagtgcaggcacctcg

SEQ ID NO: 55497 - DNA, 22 bp, synthetic construct
  misc_feature 1..22: note = chemically synthesized
  source 1..22: mol_type = other DNA
gaactcagttgaacatttccac

SEQ ID NO: 55498 - DNA, 22 bp, synthetic construct
  misc_feature 1..22: note = chemically synthesized
  source 1..22: mol_type = other DNA
agttgaacatttccactggctg

SEQ ID NO: 55499 - DNA, 22 bp, synthetic construct
  misc_feature 1..22: note = chemically synthesized
  source 1..22: mol_type = other DNA
aacatttccactggctgcactc

SEQ ID NO: 55500 - DNA, 22 bp, synthetic construct
  misc_feature 1..22: note = chemically synthesized
  source 1..22: mol_type = other DNA
ccactggctgcactctgtgttt

SEQ ID NO: 55501 - DNA, 22 bp, synthetic construct
  misc_feature 1..22: note = chemically synthesized
  source 1..22: mol_type = other DNA
cactggctgcactctgtgtttt

SEQ ID NO: 55502 - DNA, 22 bp, synthetic construct
  misc_feature 1..22: note = chemically synthesized
  source 1..22: mol_type = other DNA
gctgcactctgtgtttttgtgg

SEQ ID NO: 55503 - DNA, 22 bp, synthetic construct
  misc_feature 1..22: note = chemically synthesized
  source 1..22: mol_type = other DNA
cactctgtgtttttgtggggtg

SEQ ID NO: 55504 - DNA, 22 bp, synthetic construct
  misc_feature 1..22: note = chemically synthesized
  source 1..22: mol_type = other DNA
tgtgtttttgtggggtgaagct

SEQ ID NO: 55505 - DNA, 22 bp, synthetic construct
  misc_feature 1..22: note = chemically synthesized
  source 1..22: mol_type = other DNA
tgtttttgtggggtgaagctcc

SEQ ID NO: 55506 - DNA, 22 bp, synthetic construct
  misc_feature 1..22: note = chemically synthesized
  source 1..22: mol_type = other DNA
ttgtggggtgaagctcccagag

SEQ ID NO: 55507 - DNA, 22 bp, synthetic construct
  misc_feature 1..22: note = chemically synthesized
  source 1..22: mol_type = other DNA
tgtggggtgaagctcccagagg

SEQ ID NO: 55508 - DNA, 22 bp, synthetic construct
  misc_feature 1..22: note = chemically synthesized
  source 1..22: mol_type = other DNA
gtggggtgaagctcccagaggt

SEQ ID NO: 55509 - DNA, 22 bp, synthetic construct
  misc_feature 1..22: note = chemically synthesized
  source 1..22: mol_type = other DNA
tggggtgaagctcccagaggtg

SEQ ID NO: 55510 - DNA, 22 bp, synthetic construct
  misc_feature 1..22: note = chemically synthesized
  source 1..22: mol_type = other DNA
ccagaggtgactgaaagtcctt

SEQ ID NO: 55511 - DNA, 22 bp, synthetic construct
  misc_feature 1..22: note = chemically synthesized
  source 1..22: mol_type = other DNA
aaagtccttctgccactaacac

SEQ ID NO: 55512 - DNA, 22 bp, synthetic construct
  misc_feature 1..22: note = chemically synthesized
  source 1..22: mol_type = other DNA
ctgccactaacactgcagtcat

SEQ ID NO: 55513 - DNA, 22 bp, synthetic construct
  misc_feature 1..22: note = chemically synthesized
  source 1..22: mol_type = other DNA
tgccactaacactgcagtcata

SEQ ID NO: 55514 - DNA, 22 bp, synthetic construct
  misc_feature 1..22: note = chemically synthesized
  source 1..22: mol_type = other DNA
ccactaacactgcagtcatact

SEQ ID NO: 55515 - DNA, 22 bp, synthetic construct
  misc_feature 1..22: note = chemically synthesized
  source 1..22: mol_type = other DNA
acactgcagtcatactgccctt

SEQ ID NO: 55516 - DNA, 22 bp, synthetic construct
  misc_feature 1..22: note = chemically synthesized
  source 1..22: mol_type = other DNA
cagtcatactgcccttgctgta

SEQ ID NO: 55517 - DNA, 22 bp, synthetic construct
  misc_feature 1..22: note = chemically synthesized
  source 1..22: mol_type = other DNA
cccttgctgtacttggactagg

SEQ ID NO: 55518 - DNA, 22 bp, synthetic construct
  misc_feature 1..22: note = chemically synthesized
  source 1..22: mol_type = other DNA
gctgtacttggactagggaagg

SEQ ID NO: 55519 - DNA, 22 bp, synthetic construct
  misc_feature 1..22: note = chemically synthesized
  source 1..22: mol_type = other DNA
ctgtacttggactagggaagga

SEQ ID NO: 55520 - DNA, 22 bp, synthetic construct
  misc_feature 1..22: note = chemically synthesized
  source 1..22: mol_type = other DNA
tacttggactagggaaggaaaa

SEQ ID NO: 55521 - DNA, 22 bp, synthetic construct
  misc_feature 1..22: note = chemically synthesized
  source 1..22: mol_type = other DNA
ggactagggaaggaaaaaagat

SEQ ID NO: 55522 - DNA, 22 bp, synthetic construct
  misc_feature 1..22: note = chemically synthesized
  source 1..22: mol_type = other DNA
gactagggaaggaaaaaagatc

SEQ ID NO: 55523 - DNA, 22 bp, synthetic construct
  misc_feature 1..22: note = chemically synthesized
  source 1..22: mol_type = other DNA
gggaaggaaaaaagatcctgag

SEQ ID NO: 55524 - DNA, 22 bp, synthetic construct
  misc_feature 1..22: note = chemically synthesized
  source 1..22: mol_type = other DNA
agtgctttactcacaccccagt

SEQ ID NO: 55525 - DNA, 22 bp, synthetic construct
  misc_feature 1..22: note = chemically synthesized
  source 1..22: mol_type = other DNA
tactcacaccccagtgtgcccc

SEQ ID NO: 55526 - DNA, 22 bp, synthetic construct
  misc_feature 1..22: note = chemically synthesized
  source 1..22: mol_type = other DNA
actcacaccccagtgtgcccca

SEQ ID NO: 55527 - DNA, 22 bp, synthetic construct
  misc_feature 1..22: note = chemically synthesized
  source 1..22: mol_type = other DNA
ctcacaccccagtgtgccccag

SEQ ID NO: 55528 - DNA, 22 bp, synthetic construct
  misc_feature 1..22: note = chemically synthesized
  source 1..22: mol_type = other DNA
acaccccagtgtgccccagcca

SEQ ID NO: 55529 - DNA, 22 bp, synthetic construct
  misc_feature 1..22: note = chemically synthesized
  source 1..22: mol_type = other DNA
tggaaaagaggccagtgtgtca

SEQ ID NO: 55530 - DNA, 22 bp, synthetic construct
  misc_feature 1..22: note = chemically synthesized
  source 1..22: mol_type = other DNA
caagcaccctgaggcccctgcc

SEQ ID NO: 55531 - DNA, 22 bp, synthetic construct
  misc_feature 1..22: note = chemically synthesized
  source 1..22: mol_type = other DNA
aggcccctgcccctgctgcccc

SEQ ID NO: 55532 - DNA, 22 bp, synthetic construct
  misc_feature 1..22: note = chemically synthesized
  source 1..22: mol_type = other DNA
cccctgctgcccccaagctgta

SEQ ID NO: 55533 - DNA, 22 bp, synthetic construct
  misc_feature 1..22: note = chemically synthesized
  source 1..22: mol_type = other DNA
ctgcccccaagctgtagagcca

SEQ ID NO: 55534 - DNA, 22 bp, synthetic construct
  misc_feature 1..22: note = chemically synthesized
  source 1..22: mol_type = other DNA
cccccaagctgtagagccagaa

SEQ ID NO: 55535 - DNA, 22 bp, synthetic construct
  misc_feature 1..22: note = chemically synthesized
  source 1..22: mol_type = other DNA
tagagccagaatataaagctgg

SEQ ID NO: 55536 - DNA, 22 bp, synthetic construct
  misc_feature 1..22: note = chemically synthesized
  source 1..22: mol_type = other DNA
gcagaaaaatgtaaaaaggcta

SEQ ID NO: 55537 - DNA, 22 bp, synthetic construct
  misc_feature 1..22: note = chemically synthesized
  source 1..22: mol_type = other DNA
gactggcttagcctcccagcct

SEQ ID NO: 55538 - DNA, 22 bp, synthetic construct
  misc_feature 1..22: note = chemically synthesized
  source 1..22: mol_type = other DNA
gcttagcctcccagcctacatc

SEQ ID NO: 55539 - DNA, 22 bp, synthetic construct
  misc_feature 1..22: note = chemically synthesized
  source 1..22: mol_type = other DNA
agcctcccagcctacatctttc

SEQ ID NO: 55540 - DNA, 22 bp, synthetic construct
  misc_feature 1..22: note = chemically synthesized
  source 1..22: mol_type = other DNA
gcctcccagcctacatctttct

SEQ ID NO: 55541 - DNA, 22 bp, synthetic construct
  misc_feature 1..22: note = chemically synthesized
  source 1..22: mol_type = other DNA
ccagcctacatctttctcctgt

SEQ ID NO: 55542 - DNA, 22 bp, synthetic construct
  misc_feature 1..22: note = chemically synthesized
  source 1..22: mol_type = other DNA
catctttctcctgtgctggatc

SEQ ID NO: 55543 - DNA, 22 bp, synthetic construct
  misc_feature 1..22: note = chemically synthesized
  source 1..22: mol_type = other DNA
tctcctgtgctggatccttcct

SEQ ID NO: 55544 - DNA, 22 bp, synthetic construct
  misc_feature 1..22: note = chemically synthesized
  source 1..22: mol_type = other DNA
ctcctgtgctggatccttcctg

SEQ ID NO: 55545 - DNA, 22 bp, synthetic construct
  misc_feature 1..22: note = chemically synthesized
  source 1..22: mol_type = other DNA
tcctgtgctggatccttcctgc

SEQ ID NO: 55546 - DNA, 22 bp, synthetic construct
  misc_feature 1..22: note = chemically synthesized
  source 1..22: mol_type = other DNA
ctgtgctggatccttcctgctc

SEQ ID NO: 55547 - DNA, 22 bp, synthetic construct
  misc_feature 1..22: note = chemically synthesized
  source 1..22: mol_type = other DNA
tgctggatccttcctgctcttg

SEQ ID NO: 55548 - DNA, 22 bp, synthetic construct
  misc_feature 1..22: note = chemically synthesized
  source 1..22: mol_type = other DNA
gatccttcctgctcttgaacat

SEQ ID NO: 55549 - DNA, 22 bp, synthetic construct
  misc_feature 1..22: note = chemically synthesized
  source 1..22: mol_type = other DNA
cctgctcttgaacatcggactc

SEQ ID NO: 55550 - DNA, 22 bp, synthetic construct
  misc_feature 1..22: note = chemically synthesized
  source 1..22: mol_type = other DNA
ctgctcttgaacatcggactcc

SEQ ID NO: 55551 - DNA, 22 bp, synthetic construct
  misc_feature 1..22: note = chemically synthesized
  source 1..22: mol_type = other DNA
ctcttgaacatcggactccaag

SEQ ID NO: 55552 - DNA, 22 bp, synthetic construct
  misc_feature 1..22: note = chemically synthesized
  source 1..22: mol_type = other DNA
ttgaacatcggactccaagttc

SEQ ID NO: 55553 - DNA, 22 bp, synthetic construct
  misc_feature 1..22: note = chemically synthesized
  source 1..22: mol_type = other DNA
gaacatcggactccaagttctt

SEQ ID NO: 55554 - DNA, 22 bp, synthetic construct
  misc_feature 1..22: note = chemically synthesized
  source 1..22: mol_type = other DNA
aacatcggactccaagttcttc

SEQ ID NO: 55555 - DNA, 22 bp, synthetic construct
  misc_feature 1..22: note = chemically synthesized
  source 1..22: mol_type = other DNA
caagttcttcagctgtgggact

SEQ ID NO: 55556 - DNA, 22 bp, synthetic construct
  misc_feature 1..22: note = chemically synthesized
  source 1..22: mol_type = other DNA
ttcagctgtgggacttggactg

SEQ ID NO: 55557 - DNA, 22 bp, synthetic construct
  misc_feature 1..22: note = chemically synthesized
  source 1..22: mol_type = other DNA
cagctgtgggacttggactgtc

SEQ ID NO: 55558 - DNA, 22 bp, synthetic construct
  misc_feature 1..22: note = chemically synthesized
  source 1..22: mol_type = other DNA
agctgtgggacttggactgtct

SEQ ID NO: 55559 - DNA, 22 bp, synthetic construct
  misc_feature 1..22: note = chemically synthesized
  source 1..22: mol_type = other DNA
tgggacttggactgtcttcctt

SEQ ID NO: 55560 - DNA, 22 bp, synthetic construct
  misc_feature 1..22: note = chemically synthesized
  source 1..22: mol_type = other DNA
ggactgtcttccttgctcctca

SEQ ID NO: 55561 - DNA, 22 bp, synthetic construct
  misc_feature 1..22: note = chemically synthesized
  source 1..22: mol_type = other DNA
gactgtcttccttgctcctcag

SEQ ID NO: 55562 - DNA, 22 bp, synthetic construct
  misc_feature 1..22: note = chemically synthesized
  source 1..22: mol_type = other DNA
tcttccttgctcctcagattgc

SEQ ID NO: 55563 - DNA, 22 bp, synthetic construct
  misc_feature 1..22: note = chemically synthesized
  source 1..22: mol_type = other DNA
ccttgctcctcagattgcaggt

SEQ ID NO: 55564 - DNA, 22 bp, synthetic construct
  misc_feature 1..22: note = chemically synthesized
  source 1..22: mol_type = other DNA
cttgctcctcagattgcaggtg

SEQ ID NO: 55565 - DNA, 22 bp, synthetic construct
  misc_feature 1..22: note = chemically synthesized
  source 1..22: mol_type = other DNA
gctcctcagattgcaggtggcc

SEQ ID NO: 55566 - DNA, 22 bp, synthetic construct
  misc_feature 1..22: note = chemically synthesized
  source 1..22: mol_type = other DNA
ctcctcagattgcaggtggcct

SEQ ID NO: 55567 - DNA, 22 bp, synthetic construct
  misc_feature 1..22: note = chemically synthesized
  source 1..22: mol_type = other DNA
ctcagattgcaggtggcctatt

SEQ ID NO: 55568 - DNA, 22 bp, synthetic construct
  misc_feature 1..22: note = chemically synthesized
  source 1..22: mol_type = other DNA
agattgcaggtggcctattatg

SEQ ID NO: 55569 - DNA, 22 bp, synthetic construct
  misc_feature 1..22: note = chemically synthesized
  source 1..22: mol_type = other DNA
caggtggcctattatgggacct

SEQ ID NO: 55570 - DNA, 22 bp, synthetic construct
  misc_feature 1..22: note = chemically synthesized
  source 1..22: mol_type = other DNA
ttatgggaccttgtaatcttgt

SEQ ID NO: 55571 - DNA, 22 bp, synthetic construct
  misc_feature 1..22: note = chemically synthesized
  source 1..22: mol_type = other DNA
tgggaccttgtaatcttgtgag

SEQ ID NO: 55572 - DNA, 22 bp, synthetic construct
  misc_feature 1..22: note = chemically synthesized
  source 1..22: mol_type = other DNA
gtaatcttgtgagttaatacca

SEQ ID NO: 55573 - DNA, 22 bp, synthetic construct
  misc_feature 1..22: note = chemically synthesized
  source 1..22: mol_type = other DNA
taatcttgtgagttaataccac

SEQ ID NO: 55574 - DNA, 22 bp, synthetic construct
  misc_feature 1..22: note = chemically synthesized
  source 1..22: mol_type = other DNA
gtgagttaataccacttaataa

SEQ ID NO: 55575 - DNA, 22 bp, synthetic construct
  misc_feature 1..22: note = chemically synthesized
  source 1..22: mol_type = other DNA
tgagttaataccacttaataag

SEQ ID NO: 55576 - DNA, 22 bp, synthetic construct
  misc_feature 1..22: note = chemically synthesized
  source 1..22: mol_type = other DNA
ataccacttaataagctcccct

SEQ ID NO: 55577 - DNA, 22 bp, synthetic construct
  misc_feature 1..22: note = chemically synthesized
  source 1..22: mol_type = other DNA
aataagctcccctttgtgtgag

SEQ ID NO: 55578 - DNA, 22 bp, synthetic construct
  misc_feature 1..22: note = chemically synthesized
  source 1..22: mol_type = other DNA
ataagctcccctttgtgtgagt

SEQ ID NO: 55579 - DNA, 22 bp, synthetic construct
  misc_feature 1..22: note = chemically synthesized
  source 1..22: mol_type = other DNA
ccctttgtgtgagtatatctat

SEQ ID NO: 55580 - DNA, 22 bp, synthetic construct
  misc_feature 1..22: note = chemically synthesized
  source 1..22: mol_type = other DNA
tgtgtgagtatatctatatcta

SEQ ID NO: 55581 - DNA, 22 bp, synthetic construct
  misc_feature 1..22: note = chemically synthesized
  source 1..22: mol_type = other DNA
gtgtgagtatatctatatctat

SEQ ID NO: 55582 - DNA, 22 bp, synthetic construct
  misc_feature 1..22: note = chemically synthesized
  source 1..22: mol_type = other DNA
tgtgagtatatctatatctata

SEQ ID NO: 55583 - DNA, 22 bp, synthetic construct
  misc_feature 1..22: note = chemically synthesized
  source 1..22: mol_type = other DNA
tatctatagatagatataggta

SEQ ID NO: 55584 - DNA, 22 bp, synthetic construct
  misc_feature 1..22: note = chemically synthesized
  source 1..22: mol_type = other DNA
tagatagatataggtatactca

SEQ ID NO: 55585 - DNA, 22 bp, synthetic construct
  misc_feature 1..22: note = chemically synthesized
  source 1..22: mol_type = other DNA
actatatatacacatatataca

SEQ ID NO: 55586 - DNA, 22 bp, synthetic construct
  misc_feature 1..22: note = chemically synthesized
  source 1..22: mol_type = other DNA
tatatacacatatatacatata

SEQ ID NO: 55587 - DNA, 22 bp, synthetic construct
  misc_feature 1..22: note = chemically synthesized
  source 1..22: mol_type = other DNA
tctctctctctctctcatatat

SEQ ID NO: 55588 - DNA, 22 bp, synthetic construct
  misc_feature 1..22: note = chemically synthesized
  source 1..22: mol_type = other DNA
tctctctctctctcatatatat

SEQ ID NO: 55589 - DNA, 22 bp, synthetic construct
  misc_feature 1..22: note = chemically synthesized
  source 1..22: mol_type = other DNA
tctctctctctcatatatatat

SEQ ID NO: 55590 - DNA, 22 bp, synthetic construct
  misc_feature 1..22: note = chemically synthesized
  source 1..22: mol_type = other DNA
tctctctctcatatatatatat

SEQ ID NO: 55591 - DNA, 22 bp, synthetic construct
  misc_feature 1..22: note = chemically synthesized
  source 1..22: mol_type = other DNA
tctctctcatatatatatatat

SEQ ID NO: 55592 - DNA, 22 bp, synthetic construct
  misc_feature 1..22: note = chemically synthesized
  source 1..22: mol_type = other DNA
tctctcatatatatatatatat

SEQ ID NO: 55593 - DNA, 22 bp, synthetic construct
  misc_feature 1..22: note = chemically synthesized
  source 1..22: mol_type = other DNA
tctcatatatatatatatataa

SEQ ID NO: 55594 - DNA, 22 bp, synthetic construct
  misc_feature 1..22: note = chemically synthesized
  source 1..22: mol_type = other DNA
tcatatatatatatatataatc

SEQ ID NO: 55595 - DNA, 22 bp, synthetic construct
  misc_feature 1..22: note = chemically synthesized
  source 1..22: mol_type = other DNA
atatatatatatatataatctc

SEQ ID NO: 55596 - DNA, 22 bp, synthetic construct
  misc_feature 1..22: note = chemically synthesized
  source 1..22: mol_type = other DNA
ctattagttctgtccctctaga

SEQ ID NO: 55597 - DNA, 22 bp, synthetic construct
  misc_feature 1..22: note = chemically synthesized
  source 1..22: mol_type = other DNA
ttagttctgtccctctagagaa

SEQ ID NO: 55598 - DNA, 22 bp, synthetic construct
  misc_feature 1..22: note = chemically synthesized
  source 1..22: mol_type = other DNA
gttctgtccctctagagaaccc

SEQ ID NO: 55599 - DNA, 22 bp, synthetic construct
  misc_feature 1..22: note = chemically synthesized
  source 1..22: mol_type = other DNA
tgtccctctagagaaccccgac

SEQ ID NO: 55600 - DNA, 22 bp, synthetic construct
  misc_feature 1..22: note = chemically synthesized
  source 1..22: mol_type = other DNA
tccctctagagaaccccgacta

SEQ ID NO: 55601 - DNA, 22 bp, synthetic construct
  misc_feature 1..22: note = chemically synthesized
  source 1..22: mol_type = other DNA
tagagaaccccgactaatacag

SEQ ID NO: 55602 - DNA, 22 bp, synthetic construct
  misc_feature 1..22: note = chemically synthesized
  source 1..22: mol_type = other DNA
gagaaccccgactaatacagat

SEQ ID NO: 55603 - DNA, 22 bp, synthetic construct
  misc_feature 1..22: note = chemically synthesized
  source 1..22: mol_type = other DNA
atacagattttcataccagaag

SEQ ID NO: 55604 - DNA, 22 bp, synthetic construct
  misc_feature 1..22: note = chemically synthesized
  source 1..22: mol_type = other DNA
tcataccagaagtggttcttga

SEQ ID NO: 55605 - DNA, 22 bp, synthetic construct
  misc_feature 1..22: note = chemically synthesized
  source 1..22: mol_type = other DNA
cataccagaagtggttcttgag

SEQ ID NO: 55606 - DNA, 22 bp, synthetic construct
  misc_feature 1..22: note = chemically synthesized
  source 1..22: mol_type = other DNA
ataccagaagtggttcttgagg

SEQ ID NO: 55607 - DNA, 22 bp, synthetic construct
  misc_feature 1..22: note = chemically synthesized
  source 1..22: mol_type = other DNA
ttgaggaacagaatattaagga

SEQ ID NO: 55608 - DNA, 22 bp, synthetic construct
  misc_feature 1..22: note = chemically synthesized
  source 1..22: mol_type = other DNA
gaggaacagaatattaaggatg

SEQ ID NO: 55609 - DNA, 22 bp, synthetic construct
  misc_feature 1..22: note = chemically synthesized
  source 1..22: mol_type = other DNA
aggaacagaatattaaggatgg

SEQ ID NO: 55610 - DNA, 22 bp, synthetic construct
  misc_feature 1..22: note = chemically synthesized
  source 1..22: mol_type = other DNA
aggatggaattctttcattggt

SEQ ID NO: 55611 - DNA, 22 bp, synthetic construct
  misc_feature 1..22: note = chemically synthesized
  source 1..22: mol_type = other DNA
tttcattggttttgggacttct

SEQ ID NO: 55612 - DNA, 22 bp, synthetic construct
  misc_feature 1..22: note = chemically synthesized
  source 1..22: mol_type = other DNA
tcattggttttgggacttctgg

SEQ ID NO: 55613 - DNA, 22 bp, synthetic construct
  misc_feature 1..22: note = chemically synthesized
  source 1..22: mol_type = other DNA
cattggttttgggacttctggt

SEQ ID NO: 55614 - DNA, 22 bp, synthetic construct
  misc_feature 1..22: note = chemically synthesized
  source 1..22: mol_type = other DNA
attggttttgggacttctggtg

SEQ ID NO: 55615 - DNA, 22 bp, synthetic construct
  misc_feature 1..22: note = chemically synthesized
  source 1..22: mol_type = other DNA
gttttgggacttctggtgttgg

SEQ ID NO: 55616 - DNA, 22 bp, synthetic construct
  misc_feature 1..22: note = chemically synthesized
  source 1..22: mol_type = other DNA
tgggacttctggtgttggctga

SEQ ID NO: 55617 - DNA, 22 bp, synthetic construct
  misc_feature 1..22: note = chemically synthesized
  source 1..22: mol_type = other DNA
gggacttctggtgttggctgat

SEQ ID NO: 55618 - DNA, 22 bp, synthetic construct
  misc_feature 1..22: note = chemically synthesized
  source 1..22: mol_type = other DNA
ggacttctggtgttggctgatt

SEQ ID NO: 55619 - DNA, 22 bp, synthetic construct
  misc_feature 1..22: note = chemically synthesized
  source 1..22: mol_type = other DNA
ctggtgttggctgattaatatg

SEQ ID NO: 55620 - DNA, 22 bp, synthetic construct
  misc_feature 1..22: note = chemically synthesized
  source 1..22: mol_type = other DNA
tggtgttggctgattaatatga

SEQ ID NO: 55621 - DNA, 22 bp, synthetic construct
  misc_feature 1..22: note = chemically synthesized
  source 1..22: mol_type = other DNA
gtgttggctgattaatatgatt

SEQ ID NO: 55622 - DNA, 22 bp, synthetic construct
  misc_feature 1..22: note = chemically synthesized
  source 1..22: mol_type = other DNA
gctgattaatatgattagacca

SEQ ID NO: 55623 - DNA, 22 bp, synthetic construct
  misc_feature 1..22: note = chemically synthesized
  source 1..22: mol_type = other DNA
attaatatgattagaccaaaaa

SEQ ID NO: 55624 - DNA, 22 bp, synthetic construct
  misc_feature 1..22: note = chemically synthesized
  source 1..22: mol_type = other DNA
atatgattagaccaaaaaatgc

SEQ ID NO: 55625 - DNA, 22 bp, synthetic construct
  misc_feature 1..22: note = chemically synthesized
  source 1..22: mol_type = other DNA
gaccaaaaaatgctaaggactc

SEQ ID NO: 55626 - DNA, 22 bp, synthetic construct
  misc_feature 1..22: note = chemically synthesized
  source 1..22: mol_type = other DNA
aggactctacttctaatagtat

SEQ ID NO: 55627 - DNA, 22 bp, synthetic construct
  misc_feature 1..22: note = chemically synthesized
  source 1..22: mol_type = other DNA
tacttctaatagtatggagaac

SEQ ID NO: 55628 - DNA, 22 bp, synthetic construct
  misc_feature 1..22: note = chemically synthesized
  source 1..22: mol_type = other DNA
cttctaatagtatggagaacac

SEQ ID NO: 55629 - DNA, 22 bp, synthetic construct
  misc_feature 1..22: note = chemically synthesized
  source 1..22: mol_type = other DNA
ctaatagtatggagaacactga

SEQ ID NO: 55630 - DNA, 22 bp, synthetic construct
  misc_feature 1..22: note = chemically synthesized
  source 1..22: mol_type = other DNA
taatagtatggagaacactgat

SEQ ID NO: 55631 - DNA, 22 bp, synthetic construct
  misc_feature 1..22: note = chemically synthesized
  source 1..22: mol_type = other DNA
atagtatggagaacactgatag

SEQ ID NO: 55632 - DNA, 22 bp, synthetic construct
  misc_feature 1..22: note = chemically synthesized
  source 1..22: mol_type = other DNA
atagtacttggcctgaattgtt

SEQ ID NO: 55633 - DNA, 22 bp, synthetic construct
  misc_feature 1..22: note = chemically synthesized
  source 1..22: mol_type = other DNA
ggcctgaattgtttagagagtt

SEQ ID NO: 55634 - DNA, 22 bp, synthetic construct
  misc_feature 1..22: note = chemically synthesized
  source 1..22: mol_type = other DNA
gcctgaattgtttagagagtta

SEQ ID NO: 55635 - DNA, 22 bp, synthetic construct
  misc_feature 1..22: note = chemically synthesized
  source 1..22: mol_type = other DNA
aattgtttagagagttatgcaa

SEQ ID NO: 55636 - DNA, 22 bp, synthetic construct
  misc_feature 1..22: note = chemically synthesized
  source 1..22: mol_type = other DNA
tttagagagttatgcaaaataa

SEQ ID NO: 55637 - DNA, 22 bp, synthetic construct
  misc_feature 1..22: note = chemically synthesized
  source 1..22: mol_type = other DNA
agagagttatgcaaaataaatg

SEQ ID NO: 55638 - DNA, 22 bp, synthetic construct
  misc_feature 1..22: note = chemically synthesized
  source 1..22: mol_type = other DNA
gagagttatgcaaaataaatgc

SEQ ID NO: 55639 - DNA, 22 bp, synthetic construct
  misc_feature 1..22: note = chemically synthesized
  source 1..22: mol_type = other DNA
tgcaaaataaatgcatttgaca

SEQ ID NO: 55640 - DNA, 22 bp, synthetic construct
  misc_feature 1..22: note = chemically synthesized
  source 1..22: mol_type = other DNA
gacactactgattcatcactta

SEQ ID NO: 55641 - DNA, 22 bp, synthetic construct
  misc_feature 1..22: note = chemically synthesized
  source 1..22: mol_type = other DNA
acactactgattcatcacttat

SEQ ID NO: 55642 - DNA, 22 bp, synthetic construct
  misc_feature 1..22: note = chemically synthesized
  source 1..22: mol_type = other DNA
ctgattcatcacttatgagagg

SEQ ID NO: 55643 - DNA, 22 bp, synthetic construct
  misc_feature 1..22: note = chemically synthesized
  source 1..22: mol_type = other DNA
attcatcacttatgagaggcaa

SEQ ID NO: 55644 - DNA, 22 bp, synthetic construct
  misc_feature 1..22: note = chemically synthesized
  source 1..22: mol_type = other DNA
atcacttatgagaggcaaggag

SEQ ID NO: 55645 - DNA, 22 bp, synthetic construct
  misc_feature 1..22: note = chemically synthesized
  source 1..22: mol_type = other DNA
atgagaggcaaggagtttagtg

SEQ ID NO: 55646 - DNA, 22 bp, synthetic construct
  misc_feature 1..22: note = chemically synthesized
  source 1..22: mol_type = other DNA
tgagaggcaaggagtttagtga

SEQ ID NO: 55647 - DNA, 22 bp, synthetic construct
  misc_feature 1..22: note = chemically synthesized
  source 1..22: mol_type = other DNA
agtgactctatacataatacct

SEQ ID NO: 55648 - DNA, 22 bp, synthetic construct
  misc_feature 1..22: note = chemically synthesized
  source 1..22: mol_type = other DNA
gtgactctatacataatacctt

SEQ ID NO: 55649 - DNA, 22 bp, synthetic construct
  misc_feature 1..22: note = chemically synthesized
  source 1..22: mol_type = other DNA
tatacataatacctttgactat

SEQ ID NO: 55650 - DNA, 22 bp, synthetic construct
  misc_feature 1..22: note = chemically synthesized
  source 1..22: mol_type = other DNA
tacataatacctttgactatat

SEQ ID NO: 55651 - DNA, 22 bp, synthetic construct
  misc_feature 1..22: note = chemically synthesized
  source 1..22: mol_type = other DNA
tgactatatgtggagaaccaag

SEQ ID NO: 55652 - DNA, 22 bp, synthetic construct
  misc_feature 1..22: note = chemically synthesized
  source 1..22: mol_type = other DNA
gactatatgtggagaaccaagg

SEQ ID NO: 55653 - DNA, 22 bp, synthetic construct
  misc_feature 1..22: note = chemically synthesized
  source 1..22: mol_type = other DNA
actatatgtggagaaccaagga

SEQ ID NO: 55654 - DNA, 22 bp, synthetic construct
  misc_feature 1..22: note = chemically synthesized
  source 1..22: mol_type = other DNA
tatgtggagaaccaaggaacat

SEQ ID NO: 55655 - DNA, 22 bp, synthetic construct
  misc_feature 1..22: note = chemically synthesized
  source 1..22: mol_type = other DNA
gttgattgctcctaagttctct

SEQ ID NO: 55656 - DNA, 22 bp, synthetic construct
  misc_feature 1..22: note = chemically synthesized
  source 1..22: mol_type = other DNA
attgctcctaagttctctggag

SEQ ID NO: 55657 - DNA, 22 bp, synthetic construct
  misc_feature 1..22: note = chemically synthesized
  source 1..22: mol_type = other DNA
ctcctaagttctctggagaaag

SEQ ID NO: 55658 - DNA, 22 bp, synthetic construct
  misc_feature 1..22: note = chemically synthesized
  source 1..22: mol_type = other DNA
ctaagttctctggagaaagaga

SEQ ID NO: 55659 - DNA, 22 bp, synthetic construct
  misc_feature 1..22: note = chemically synthesized
  source 1..22: mol_type = other DNA
agttctctggagaaagagatga

SEQ ID NO: 55660 - DNA, 22 bp, synthetic construct
  misc_feature 1..22: note = chemically synthesized
  source 1..22: mol_type = other DNA
tctggagaaagagatgaaagaa

SEQ ID NO: 55661 - DNA, 22 bp, synthetic construct
  misc_feature 1..22: note = chemically synthesized
  source 1..22: mol_type = other DNA
tggagaaagagatgaaagaaaa

SEQ ID NO: 55662 - DNA, 22 bp, synthetic construct
  misc_feature 1..22: note = chemically synthesized
  source 1..22: mol_type = other DNA
gagaaagagatgaaagaaaatg

SEQ ID NO: 55663 - DNA, 22 bp, synthetic construct
  misc_feature 1..22: note = chemically synthesized
  source 1..22: mol_type = other DNA
aggggatctgtctcccaccttc

SEQ ID NO: 55664 - DNA, 22 bp, synthetic construct
  misc_feature 1..22: note = chemically synthesized
  source 1..22: mol_type = other DNA
tctcccaccttcagaagcagat

SEQ ID NO: 55665 - DNA, 22 bp, synthetic construct
  misc_feature 1..22: note = chemically synthesized
  source 1..22: mol_type = other DNA
ccaccttcagaagcagatactg

SEQ ID NO: 55666 - DNA, 22 bp, synthetic construct
  misc_feature 1..22: note = chemically synthesized
  source 1..22: mol_type = other DNA
cagaagcagatactgagccaca

SEQ ID NO: 55667 - DNA, 22 bp, synthetic construct
  misc_feature 1..22: note = chemically synthesized
  source 1..22: mol_type = other DNA
agaagcagatactgagccacaa

SEQ ID NO: 55668 - DNA, 22 bp, synthetic construct
  misc_feature 1..22: note = chemically synthesized
  source 1..22: mol_type = other DNA
agccacaaatctgctaagattg

SEQ ID NO: 55669 - DNA, 22 bp, synthetic construct
  misc_feature 1..22: note = chemically synthesized
  source 1..22: mol_type = other DNA
ctaagattgccctgaatgagag

SEQ ID NO: 55670 - DNA, 22 bp, synthetic construct
  misc_feature 1..22: note = chemically synthesized
  source 1..22: mol_type = other DNA
agattgccctgaatgagagttt

SEQ ID NO: 55671 - DNA, 22 bp, synthetic construct
  misc_feature 1..22: note = chemically synthesized
  source 1..22: mol_type = other DNA
ccctgaatgagagttttaactc

SEQ ID NO: 55672 - DNA, 22 bp, synthetic construct
  misc_feature 1..22: note = chemically synthesized
  source 1..22: mol_type = other DNA
aatgagagttttaactcctgta

SEQ ID NO: 55673 - DNA, 22 bp, synthetic construct
  misc_feature 1..22: note = chemically synthesized
  source 1..22: mol_type = other DNA
taactcctgtagagaaagagtt

SEQ ID NO: 55674 - DNA, 22 bp, synthetic construct
  misc_feature 1..22: note = chemically synthesized
  source 1..22: mol_type = other DNA
aactcctgtagagaaagagttg

SEQ ID NO: 55675 - DNA, 22 bp, synthetic construct
  misc_feature 1..22: note = chemically synthesized
  source 1..22: mol_type = other DNA
actcctgtagagaaagagttga

SEQ ID NO: 55676 - DNA, 22 bp, synthetic construct
  misc_feature 1..22: note = chemically synthesized
  source 1..22: mol_type = other DNA
ctgtagagaaagagttgaaatt

SEQ ID NO: 55677 - DNA, 22 bp, synthetic construct
  misc_feature 1..22: note = chemically synthesized
  source 1..22: mol_type = other DNA
tagagaaagagttgaaattgtg

SEQ ID NO: 55678 - DNA, 22 bp, synthetic construct
  misc_feature 1..22: note = chemically synthesized
  source 1..22: mol_type = other DNA
aaattgtgaaaaaacagagaca

SEQ ID NO: 55679 - DNA, 22 bp, synthetic construct
  misc_feature 1..22: note = chemically synthesized
  source 1..22: mol_type = other DNA
tgaaaaaacagagacaagctgt

SEQ ID NO: 55680 - DNA, 22 bp, synthetic construct
  misc_feature 1..22: note = chemically synthesized
  source 1..22: mol_type = other DNA
ttatcatgcgagtagctgatct

SEQ ID NO: 55681 - DNA, 22 bp, synthetic construct
  misc_feature 1..22: note = chemically synthesized
  source 1..22: mol_type = other DNA
tcatgcgagtagctgatctgca

SEQ ID NO: 55682 - DNA, 22 bp, synthetic construct
  misc_feature 1..22: note = chemically synthesized
  source 1..22: mol_type = other DNA
atctgcaacaagaggtgcatgc

SEQ ID NO: 55683 - DNA, 22 bp, synthetic construct
  misc_feature 1..22: note = chemically synthesized
  source 1..22: mol_type = other DNA
caacaagaggtgcatgcacagc

SEQ ID NO: 55684 - DNA, 22 bp, synthetic construct
  misc_feature 1..22: note = chemically synthesized
  source 1..22: mol_type = other DNA
gccaggtgtttactgttaaagt

SEQ ID NO: 55685 - DNA, 22 bp, synthetic construct
  misc_feature 1..22: note = chemically synthesized
  source 1..22: mol_type = other DNA
ccaggtgtttactgttaaagtg

SEQ ID NO: 55686 - DNA, 22 bp, synthetic construct
  misc_feature 1..22: note = chemically synthesized
  source 1..22: mol_type = other DNA
actgttaaagtgagggcattga

SEQ ID NO: 55687 - DNA, 22 bp, synthetic construct
  misc_feature 1..22: note = chemically synthesized
  source 1..22: mol_type = other DNA
ctgttaaagtgagggcattgac

SEQ ID NO: 55688 - DNA, 22 bp, synthetic construct
  misc_feature 1..22: note = chemically synthesized
  source 1..22: mol_type = other DNA
ttaaagtgagggcattgactgg

SEQ ID NO: 55689 - DNA, 22 bp, synthetic construct
  misc_feature 1..22: note = chemically synthesized
  source 1..22: mol_type = other DNA
aagtgagggcattgactggaaa

SEQ ID NO: 55690 - DNA, 22 bp, synthetic construct
  misc_feature 1..22: note = chemically synthesized
  source 1..22: mol_type = other DNA
actggaaaaaaatgggaccctg

SEQ ID NO: 55691 - DNA, 22 bp, synthetic construct
  misc_feature 1..22: note = chemically synthesized
  source 1..22: mol_type = other DNA
gaaaaaaatgggaccctggaac

SEQ ID NO: 55692 - DNA, 22 bp, synthetic construct
  misc_feature 1..22: note = chemically synthesized
  source 1..22: mol_type = other DNA
gaacttggagtggggatgtgtg

SEQ ID NO: 55693 - DNA, 22 bp, synthetic construct
  misc_feature 1..22: note = chemically synthesized
  source 1..22: mol_type = other DNA
ggagtggggatgtgtgggagaa

SEQ ID NO: 55694 - DNA, 22 bp, synthetic construct
  misc_feature 1..22: note = chemically synthesized
  source 1..22: mol_type = other DNA
gagtggggatgtgtgggagaac

SEQ ID NO: 55695 - DNA, 22 bp, synthetic construct
  misc_feature 1..22: note = chemically synthesized
  source 1..22: mol_type = other DNA
atgaagctgaggacactgagtt

SEQ ID NO: 55696 - DNA, 22 bp, synthetic construct
  misc_feature 1..22: note = chemically synthesized
  source 1..22: mol_type = other DNA
aggacactgagtttgtgaactc

SEQ ID NO: 55697 - DNA, 22 bp, synthetic construct
  misc_feature 1..22: note = chemically synthesized
  source 1..22: mol_type = other DNA
agtttgtgaactctgatgaaac

SEQ ID NO: 55698 - DNA, 22 bp, synthetic construct
  misc_feature 1..22: note = chemically synthesized
  source 1..22: mol_type = other DNA
gtgaactctgatgaaacttttt

SEQ ID NO: 55699 - DNA, 22 bp, synthetic construct
  misc_feature 1..22: note = chemically synthesized
  source 1..22: mol_type = other DNA
tgaactctgatgaaactttttt

SEQ ID NO: 55700 - DNA, 22 bp, synthetic construct
  misc_feature 1..22: note = chemically synthesized
  source 1..22: mol_type = other DNA
tgatgaaacttttttgccagaa

SEQ ID NO: 55701 - DNA, 22 bp, synthetic construct
  misc_feature 1..22: note = chemically synthesized
  source 1..22: mol_type = other DNA
atgaaacttttttgccagaaga

SEQ ID NO: 55702 - DNA, 22 bp, synthetic construct
  misc_feature 1..22: note = chemically synthesized
  source 1..22: mol_type = other DNA
ttttgccagaagaaacagtttc

SEQ ID NO: 55703 - DNA, 22 bp, synthetic construct
  misc_feature 1..22: note = chemically synthesized
  source 1..22: mol_type = other DNA
tttgccagaagaaacagtttcc

SEQ ID NO: 55704 - DNA, 22 bp, synthetic construct
  misc_feature 1..22: note = chemically synthesized
  source 1..22: mol_type = other DNA
ttgccagaagaaacagtttccc

SEQ ID NO: 55705 - DNA, 22 bp, synthetic construct
  misc_feature 1..22: note = chemically synthesized
  source 1..22: mol_type = other DNA
tgccagaagaaacagtttcccc

SEQ ID NO: 55706 - DNA, 22 bp, synthetic construct
  misc_feature 1..22: note = chemically synthesized
  source 1..22: mol_type = other DNA
gccagaagaaacagtttcccca

SEQ ID NO: 55707 - DNA, 22 bp, synthetic construct
  misc_feature 1..22: note = chemically synthesized
  source 1..22: mol_type = other DNA
ccagaagaaacagtttccccat

SEQ ID NO: 55708 - DNA, 22 bp, synthetic construct
  misc_feature 1..22: note = chemically synthesized
  source 1..22: mol_type = other DNA
ccccatccccagtagtggtaac

SEQ ID NO: 55709 - DNA, 22 bp, synthetic construct
  misc_feature 1..22: note = chemically synthesized
  source 1..22: mol_type = other DNA
cccatccccagtagtggtaaca

SEQ ID NO: 55710 - DNA, 22 bp, synthetic construct
  misc_feature 1..22: note = chemically synthesized
  source 1..22: mol_type = other DNA
cctgacccgtgctgccattagc

SEQ ID NO: 55711 - DNA, 22 bp, synthetic construct
  misc_feature 1..22: note = chemically synthesized
  source 1..22: mol_type = other DNA
acccgtgctgccattagccttt

SEQ ID NO: 55712 - DNA, 22 bp, synthetic construct
  misc_feature 1..22: note = chemically synthesized
  source 1..22: mol_type = other DNA
ccattagcctttccacctttgt

SEQ ID NO: 55713 - DNA, 22 bp, synthetic construct
  misc_feature 1..22: note = chemically synthesized
  source 1..22: mol_type = other DNA
gcctttccacctttgtctgagg

SEQ ID NO: 55714 - DNA, 22 bp, synthetic construct
  misc_feature 1..22: note = chemically synthesized
  source 1..22: mol_type = other DNA
tccacctttgtctgaggatgta

SEQ ID NO: 55715 - DNA, 22 bp, synthetic construct
  misc_feature 1..22: note = chemically synthesized
  source 1..22: mol_type = other DNA
ccacctttgtctgaggatgtaa

SEQ ID NO: 55716 - DNA, 22 bp, synthetic construct
  misc_feature 1..22: note = chemically synthesized
  source 1..22: mol_type = other DNA
cacctttgtctgaggatgtaaa

SEQ ID NO: 55717 - DNA, 22 bp, synthetic construct
  misc_feature 1..22: note = chemically synthesized
  source 1..22: mol_type = other DNA
tgtctgaggatgtaaaccctgc

SEQ ID NO: 55718 - DNA, 22 bp, synthetic construct
  misc_feature 1..22: note = chemically synthesized
  source 1..22: mol_type = other DNA
gtctgaggatgtaaaccctgca

SEQ ID NO: 55719 - DNA, 22 bp, synthetic construct
  misc_feature 1..22: note = chemically synthesized
  source 1..22: mol_type = other DNA
tctgaggatgtaaaccctgcac

SEQ ID NO: 55720 - DNA, 22 bp, synthetic construct
  misc_feature 1..22: note = chemically synthesized
  source 1..22: mol_type = other DNA
aggatgtaaaccctgcactgct

SEQ ID NO: 55721 - DNA, 22 bp, synthetic construct
  misc_feature 1..22: note = chemically synthesized
  source 1..22: mol_type = other DNA
cactgcttgaggcaacagtgat

SEQ ID NO: 55722 - DNA, 22 bp, synthetic construct
  misc_feature 1..22: note = chemically synthesized
  source 1..22: mol_type = other DNA
cttgaggcaacagtgatggcct

SEQ ID NO: 55723 - DNA, 22 bp, synthetic construct
  misc_feature 1..22: note = chemically synthesized
  source 1..22: mol_type = other DNA
gaggcaacagtgatggccttcc

SEQ ID NO: 55724 - DNA, 22 bp, synthetic construct
  misc_feature 1..22: note = chemically synthesized
  source 1..22: mol_type = other DNA
aggcaacagtgatggccttccc

SEQ ID NO: 55725 - DNA, 22 bp, synthetic construct
  misc_feature 1..22: note = chemically synthesized
  source 1..22: mol_type = other DNA
ccctgaggcagctgccaggcaa

SEQ ID NO: 55726 - DNA, 22 bp, synthetic construct
  misc_feature 1..22: note = chemically synthesized
  source 1..22: mol_type = other DNA
cctgaggcagctgccaggcaag

SEQ ID NO: 55727 - DNA, 22 bp, synthetic construct
  misc_feature 1..22: note = chemically synthesized
  source 1..22: mol_type = other DNA
aggcagctgccaggcaagataa

SEQ ID NO: 55728 - DNA, 22 bp, synthetic construct
  misc_feature 1..22: note = chemically synthesized
  source 1..22: mol_type = other DNA
ccaggcaagataatgttgattc

SEQ ID NO: 55729 - DNA, 22 bp, synthetic construct
  misc_feature 1..22: note = chemically synthesized
  source 1..22: mol_type = other DNA
attctcctcaagaggcacccct

SEQ ID NO: 55730 - DNA, 22 bp, synthetic construct
  misc_feature 1..22: note = chemically synthesized
  source 1..22: mol_type = other DNA
tcctcaagaggcacccctaatg

SEQ ID NO: 55731 - DNA, 22 bp, synthetic construct
  misc_feature 1..22: note = chemically synthesized
  source 1..22: mol_type = other DNA
ctcaagaggcacccctaatgcc

SEQ ID NO: 55732 - DNA, 22 bp, synthetic construct
  misc_feature 1..22: note = chemically synthesized
  source 1..22: mol_type = other DNA
aagaggcacccctaatgcccct

SEQ ID NO: 55733 - DNA, 22 bp, synthetic construct
  misc_feature 1..22: note = chemically synthesized
  source 1..22: mol_type = other DNA
atgcccctgaatgcttctagac

SEQ ID NO: 55734 - DNA, 22 bp, synthetic construct
  misc_feature 1..22: note = chemically synthesized
  source 1..22: mol_type = other DNA
aatgcttctagacctataacta

SEQ ID NO: 55735 - DNA, 22 bp, synthetic construct
  misc_feature 1..22: note = chemically synthesized
  source 1..22: mol_type = other DNA
ctagacctataactaggctaaa

SEQ ID NO: 55736 - DNA, 22 bp, synthetic construct
  misc_feature 1..22: note = chemically synthesized
  source 1..22: mol_type = other DNA
tagacctataactaggctaaat

SEQ ID NO: 55737 - DNA, 22 bp, synthetic construct
  misc_feature 1..22: note = chemically synthesized
  source 1..22: mol_type = other DNA
gacctataactaggctaaattc

SEQ ID NO: 55738 - DNA, 22 bp, synthetic construct
  misc_feature 1..22: note = chemically synthesized
  source 1..22: mol_type = other DNA
taactaggctaaattccttgcg

SEQ ID NO: 55739 - DNA, 22 bp, synthetic construct
  misc_feature 1..22: note = chemically synthesized
  source 1..22: mol_type = other DNA
ggctaaattccttgcgggcccc

SEQ ID NO: 55740 - DNA, 22 bp, synthetic construct
  misc_feature 1..22: note = chemically synthesized
  source 1..22: mol_type = other DNA
aattccttgcgggccccagagg

SEQ ID NO: 55741 - DNA, 22 bp, synthetic construct
  misc_feature 1..22: note = chemically synthesized
  source 1..22: mol_type = other DNA
cttgcgggccccagaggtgagg

SEQ ID NO: 55742 - DNA, 22 bp, synthetic construct
  misc_feature 1..22: note = chemically synthesized
  source 1..22: mol_type = other DNA
gcgggccccagaggtgaggttc

SEQ ID NO: 55743 - DNA, 22 bp, synthetic construct
  misc_feature 1..22: note = chemically synthesized
  source 1..22: mol_type = other DNA
cgggccccagaggtgaggttca

SEQ ID NO: 55744 - DNA, 22 bp, synthetic construct
  misc_feature 1..22: note = chemically synthesized
  source 1..22: mol_type = other DNA
agagtgtgacccatgaggaggt

SEQ ID NO: 55745 - DNA, 22 bp, synthetic construct
  misc_feature 1..22: note = chemically synthesized
  source 1..22: mol_type = other DNA
tactctaaaagaactgcttaag

SEQ ID NO: 55746 - DNA, 22 bp, synthetic construct
  misc_feature 1..22: note = chemically synthesized
  source 1..22: mol_type = other DNA
taaaagaactgcttaagctttc

SEQ ID NO: 55747 - DNA, 22 bp, synthetic construct
  misc_feature 1..22: note = chemically synthesized
  source 1..22: mol_type = other DNA
aaagaactgcttaagctttcta

SEQ ID NO: 55748 - DNA, 22 bp, synthetic construct
  misc_feature 1..22: note = chemically synthesized
  source 1..22: mol_type = other DNA
cttaagctttctaatttatatt

SEQ ID NO: 55749 - DNA, 22 bp, synthetic construct
  misc_feature 1..22: note = chemically synthesized
  source 1..22: mol_type = other DNA
aagctttctaatttatattggc

SEQ ID NO: 55750 - DNA, 22 bp, synthetic construct
  misc_feature 1..22: note = chemically synthesized
  source 1..22: mol_type = other DNA
agctttctaatttatattggca

SEQ ID NO: 55751 - DNA, 22 bp, synthetic construct
  misc_feature 1..22: note = chemically synthesized
  source 1..22: mol_type = other DNA
tctaatttatattggcagaaat

SEQ ID NO: 55752 - DNA, 22 bp, synthetic construct
  misc_feature 1..22: note = chemically synthesized
  source 1..22: mol_type = other DNA
ctaatttatattggcagaaatc

SEQ ID NO: 55753 - DNA, 22 bp, synthetic construct
  misc_feature 1..22: note = chemically synthesized
  source 1..22: mol_type = other DNA
taatttatattggcagaaatct

SEQ ID NO: 55754 - DNA, 22 bp, synthetic construct
  misc_feature 1..22: note = chemically synthesized
  source 1..22: mol_type = other DNA
atttatattggcagaaatctgg

SEQ ID NO: 55755 - DNA, 22 bp, synthetic construct
  misc_feature 1..22: note = chemically synthesized
  source 1..22: mol_type = other DNA
atattggcagaaatctggagaa

SEQ ID NO: 55756 - DNA, 22 bp, synthetic construct
  misc_feature 1..22: note = chemically synthesized
  source 1..22: mol_type = other DNA
tattggcagaaatctggagaac

SEQ ID NO: 55757 - DNA, 22 bp, synthetic construct
  misc_feature 1..22: note = chemically synthesized
  source 1..22: mol_type = other DNA
gcagaaatctggagaacaggca

SEQ ID NO: 55758 - DNA, 22 bp, synthetic construct
  misc_feature 1..22: note = chemically synthesized
  source 1..22: mol_type = other DNA
gagaacaggcatgggaatggat

SEQ ID NO: 55759 - DNA, 22 bp, synthetic construct
  misc_feature 1..22: note = chemically synthesized
  source 1..22: mol_type = other DNA
agggtaagggataatggtggaa

SEQ ID NO: 55760 - DNA, 22 bp, synthetic construct
  misc_feature 1..22: note = chemically synthesized
  source 1..22: mol_type = other DNA
gatcaagctgaatttattggtt

SEQ ID NO: 55761 - DNA, 22 bp, synthetic construct
  misc_feature 1..22: note = chemically synthesized
  source 1..22: mol_type = other DNA
aatttattggtttggccctact

SEQ ID NO: 55762 - DNA, 22 bp, synthetic construct
  misc_feature 1..22: note = chemically synthesized
  source 1..22: mol_type = other DNA
attggtttggccctactaagta

SEQ ID NO: 55763 - DNA, 22 bp, synthetic construct
  misc_feature 1..22: note = chemically synthesized
  source 1..22: mol_type = other DNA
ttggtttggccctactaagtag

SEQ ID NO: 55764 - DNA, 22 bp, synthetic construct
  misc_feature 1..22: note = chemically synthesized
  source 1..22: mol_type = other DNA
gtttggccctactaagtaggga

SEQ ID NO: 55765 - DNA, 22 bp, synthetic construct
  misc_feature 1..22: note = chemically synthesized
  source 1..22: mol_type = other DNA
ggccctactaagtagggattct

SEQ ID NO: 55766 - DNA, 22 bp, synthetic construct
  misc_feature 1..22: note = chemically synthesized
  source 1..22: mol_type = other DNA
gccctactaagtagggattctg

SEQ ID NO: 55767 - DNA, 22 bp, synthetic construct
  misc_feature 1..22: note = chemically synthesized
  source 1..22: mol_type = other DNA
ctaagtagggattctgcattta

SEQ ID NO: 55768 - DNA, 22 bp, synthetic construct
  misc_feature 1..22: note = chemically synthesized
  source 1..22: mol_type = other DNA
agtagggattctgcatttaatg

SEQ ID NO: 55769 - DNA, 22 bp, synthetic construct
  misc_feature 1..22: note = chemically synthesized
  source 1..22: mol_type = other DNA
tgcatttaatgttgcagctcgg

SEQ ID NO: 55770 - DNA, 22 bp, synthetic construct
  misc_feature 1..22: note = chemically synthesized
  source 1..22: mol_type = other DNA
catttaatgttgcagctcgggg

SEQ ID NO: 55771 - DNA, 22 bp, synthetic construct
  misc_feature 1..22: note = chemically synthesized
  source 1..22: mol_type = other DNA
aatgttgcagctcggggactta

SEQ ID NO: 55772 - DNA, 22 bp, synthetic construct
  misc_feature 1..22: note = chemically synthesized
  source 1..22: mol_type = other DNA
atgttgcagctcggggacttag

SEQ ID NO: 55773 - DNA, 22 bp, synthetic construct
  misc_feature 1..22: note = chemically synthesized
  source 1..22: mol_type = other DNA
cagctcggggacttagaaaagg

SEQ ID NO: 55774 - DNA, 22 bp, synthetic construct
  misc_feature 1..22: note = chemically synthesized
  source 1..22: mol_type = other DNA
ggggacttagaaaaggttctga

SEQ ID NO: 55775 - DNA, 22 bp, synthetic construct
  misc_feature 1..22: note = chemically synthesized
  source 1..22: mol_type = other DNA
agaaaaggttctgatagggccg

SEQ ID NO: 55776 - DNA, 22 bp, synthetic construct
  misc_feature 1..22: note = chemically synthesized
  source 1..22: mol_type = other DNA
gaaaaggttctgatagggccgg

SEQ ID NO: 55777 - DNA, 22 bp, synthetic construct
  misc_feature 1..22: note = chemically synthesized
  source 1..22: mol_type = other DNA
tgatagggccgggagcagtggc

SEQ ID NO: 55778 - DNA, 22 bp, synthetic construct
  misc_feature 1..22: note = chemically synthesized
  source 1..22: mol_type = other DNA
atagggccgggagcagtggctc

SEQ ID NO: 55779 - DNA, 22 bp, synthetic construct
  misc_feature 1..22: note = chemically synthesized
  source 1..22: mol_type = other DNA
acgcctgtaatcccagcacctt

SEQ ID NO: 55780 - DNA, 22 bp, synthetic construct
  misc_feature 1..22: note = chemically synthesized
  source 1..22: mol_type = other DNA
taatcccagcaccttgggaggc

SEQ ID NO: 55781 - DNA, 22 bp, synthetic construct
  misc_feature 1..22: note = chemically synthesized
  source 1..22: mol_type = other DNA
gggaggcgggggcgggcagatc

SEQ ID NO: 55782 - DNA, 22 bp, synthetic construct
  misc_feature 1..22: note = chemically synthesized
  source 1..22: mol_type = other DNA
ggaggcgggggcgggcagatca

SEQ ID NO: 55783 - DNA, 22 bp, synthetic construct
  misc_feature 1..22: note = chemically synthesized
  source 1..22: mol_type = other DNA
agacaattctggctaaaatggt

SEQ ID NO: 55784 - DNA, 22 bp, synthetic construct
  misc_feature 1..22: note = chemically synthesized
  source 1..22: mol_type = other DNA
tggctaaaatggtgaaacccca

SEQ ID NO: 55785 - DNA, 22 bp, synthetic construct
  misc_feature 1..22: note = chemically synthesized
  source 1..22: mol_type = other DNA
gctaaaatggtgaaaccccatc

SEQ ID NO: 55786 - DNA, 22 bp, synthetic construct
  misc_feature 1..22: note = chemically synthesized
  source 1..22: mol_type = other DNA
aaatggtgaaaccccatctctg

SEQ ID NO: 55787 - DNA, 22 bp, synthetic construct
  misc_feature 1..22: note = chemically synthesized
  source 1..22: mol_type = other DNA
tgctaaaaatacaaaaattagc

SEQ ID NO: 55788 - DNA, 22 bp, synthetic construct
  misc_feature 1..22: note = chemically synthesized
  source 1..22: mol_type = other DNA
ctaaaaatacaaaaattagctg

SEQ ID NO: 55789 - DNA, 22 bp, synthetic construct
  misc_feature 1..22: note = chemically synthesized
  source 1..22: mol_type = other DNA
aaaatacaaaaattagctgggc

SEQ ID NO: 55790 - DNA, 22 bp, synthetic construct
  misc_feature 1..22: note = chemically synthesized
  source 1..22: mol_type = other DNA
gctgggcatggtgatgcgtaac

SEQ ID NO: 55791 - DNA, 22 bp, synthetic construct
  misc_feature 1..22: note = chemically synthesized
  source 1..22: mol_type = other DNA
ggcatggtgatgcgtaactgta

SEQ ID NO: 55792 - DNA, 22 bp, synthetic construct
  misc_feature 1..22: note = chemically synthesized
  source 1..22: mol_type = other DNA
taatctcatctacttgggaggc

SEQ ID NO: 55793 - DNA, 22 bp, synthetic construct
  misc_feature 1..22: note = chemically synthesized
  source 1..22: mol_type = other DNA
atctacttgggaggctgaggca

SEQ ID NO: 55794 - DNA, 22 bp, synthetic construct
  misc_feature 1..22: note = chemically synthesized
  source 1..22: mol_type = other DNA
cttgggaggctgaggcaagaga

SEQ ID NO: 55795 - DNA, 22 bp, synthetic construct
  misc_feature 1..22: note = chemically synthesized
  source 1..22: mol_type = other DNA
gggaggctgaggcaagagaact

SEQ ID NO: 55796 - DNA, 22 bp, synthetic construct
  misc_feature 1..22: note = chemically synthesized
  source 1..22: mol_type = other DNA
ggaggctgaggcaagagaactg

SEQ ID NO: 55797 - DNA, 22 bp, synthetic construct
  misc_feature 1..22: note = chemically synthesized
  source 1..22: mol_type = other DNA
aggcaagagaactgcttgaacc

SEQ ID NO: 55798 - DNA, 22 bp, synthetic construct
  misc_feature 1..22: note = chemically synthesized
  source 1..22: mol_type = other DNA
cttgaacctgtgaggcagagat

SEQ ID NO: 55799 - DNA, 22 bp, synthetic construct
  misc_feature 1..22: note = chemically synthesized
  source 1..22: mol_type = other DNA
gaacctgtgaggcagagattgc

SEQ ID NO: 55800 - DNA, 22 bp, synthetic construct
  misc_feature 1..22: note = chemically synthesized
  source 1..22: mol_type = other DNA
aacctgtgaggcagagattgca

SEQ ID NO: 55801 - DNA, 22 bp, synthetic construct
  misc_feature 1..22: note = chemically synthesized
  source 1..22: mol_type = other DNA
tgaggcagagattgcagtgagc

SEQ ID NO: 55802 - DNA, 22 bp, synthetic construct
  misc_feature 1..22: note = chemically synthesized
  source 1..22: mol_type = other DNA
cagtgagccaagatcgccccac

SEQ ID NO: 55803 - DNA, 22 bp, synthetic construct
  misc_feature 1..22: note = chemically synthesized
  source 1..22: mol_type = other DNA
cattccagcctggtaacagagc

SEQ ID NO: 55804 - DNA, 22 bp, synthetic construct
  misc_feature 1..22: note = chemically synthesized
  source 1..22: mol_type = other DNA
cagcctggtaacagagcaagac

SEQ ID NO: 55805 - DNA, 22 bp, synthetic construct
  misc_feature 1..22: note = chemically synthesized
  source 1..22: mol_type = other DNA
gtaacagagcaagactccattt

SEQ ID NO: 55806 - DNA, 22 bp, synthetic construct
  misc_feature 1..22: note = chemically synthesized
  source 1..22: mol_type = other DNA
catttccaaaaaaaaaaaaaaa

SEQ ID NO: 55807 - DNA, 22 bp, synthetic construct
  misc_feature 1..22: note = chemically synthesized
  source 1..22: mol_type = other DNA
ccaaaaaaaaaaaaaaaaaagt

SEQ ID NO: 55808 - DNA, 22 bp, synthetic construct
  misc_feature 1..22: note = chemically synthesized
  source 1..22: mol_type = other DNA
caaaaaaaaaaaaaaaaaagtt

SEQ ID NO: 55809 - DNA, 22 bp, synthetic construct
  misc_feature 1..22: note = chemically synthesized
  source 1..22: mol_type = other DNA
taatagtttatttgcttggtta

SEQ ID NO: 55810 - DNA, 22 bp, synthetic construct
  misc_feature 1..22: note = chemically synthesized
  source 1..22: mol_type = other DNA
atttgcttggttagctgaaata

SEQ ID NO: 55811 - DNA, 22 bp, synthetic construct
  misc_feature 1..22: note = chemically synthesized
  source 1..22: mol_type = other DNA
tttgcttggttagctgaaatat

SEQ ID NO: 55812 - DNA, 22 bp, synthetic construct
  misc_feature 1..22: note = chemically synthesized
  source 1..22: mol_type = other DNA
gcttggttagctgaaatatgga

SEQ ID NO: 55813 - DNA, 22 bp, synthetic construct
  misc_feature 1..22: note = chemically synthesized
  source 1..22: mol_type = other DNA
cttggttagctgaaatatggat

SEQ ID NO: 55814 - DNA, 22 bp, synthetic construct
  misc_feature 1..22: note = chemically synthesized
  source 1..22: mol_type = other DNA
ggttagctgaaatatggattaa

SEQ ID NO: 55815 - DNA, 22 bp, synthetic construct
  misc_feature 1..22: note = chemically synthesized
  source 1..22: mol_type = other DNA
gttagctgaaatatggattaaa

SEQ ID NO: 55816 - DNA, 22 bp, synthetic construct
  misc_feature 1..22: note = chemically synthesized
  source 1..22: mol_type = other DNA
gctgaaatatggattaaaagat

SEQ ID NO: 55817 - DNA, 22 bp, synthetic construct
  misc_feature 1..22: note = chemically synthesized
  source 1..22: mol_type = other DNA
aaatatggattaaaagatggtc

SEQ ID NO: 55818 - DNA, 22 bp, synthetic construct
  misc_feature 1..22: note = chemically synthesized
  source 1..22: mol_type = other DNA
aaagatggtccaatgttagtga

SEQ ID NO: 55819 - DNA, 22 bp, synthetic construct
  misc_feature 1..22: note = chemically synthesized
  source 1..22: mol_type = other DNA
gtgagctggaaatgccttggtt

SEQ ID NO: 55820 - DNA, 22 bp, synthetic construct
  misc_feature 1..22: note = chemically synthesized
  source 1..22: mol_type = other DNA
gaaatgccttggtttaatgtag

SEQ ID NO: 55821 - DNA, 22 bp, synthetic construct
  misc_feature 1..22: note = chemically synthesized
  source 1..22: mol_type = other DNA
ggtttaatgtagaggaagtgat

SEQ ID NO: 55822 - DNA, 22 bp, synthetic construct
  misc_feature 1..22: note = chemically synthesized
  source 1..22: mol_type = other DNA
gtttaatgtagaggaagtgatc

SEQ ID NO: 55823 - DNA, 22 bp, synthetic construct
  misc_feature 1..22: note = chemically synthesized
  source 1..22: mol_type = other DNA
aatgtagaggaagtgatccaaa

SEQ ID NO: 55824 - DNA, 22 bp, synthetic construct
  misc_feature 1..22: note = chemically synthesized
  source 1..22: mol_type = other DNA
atgtagaggaagtgatccaaag

SEQ ID NO: 55825 - DNA, 22 bp, synthetic construct
  misc_feature 1..22: note = chemically synthesized
  source 1..22: mol_type = other DNA
agggagattaggatggtggagt

SEQ ID NO: 55826 - DNA, 22 bp, synthetic construct
  misc_feature 1..22: note = chemically synthesized
  source 1..22: mol_type = other DNA
gggagattaggatggtggagtg

SEQ ID NO: 55827 - DNA, 22 bp, synthetic construct
  misc_feature 1..22: note = chemically synthesized
  source 1..22: mol_type = other DNA
ggatggtggagtggattagtca

SEQ ID NO: 55828 - DNA, 22 bp, synthetic construct
  misc_feature 1..22: note = chemically synthesized
  source 1..22: mol_type = other DNA
gtcactttagacctactcatcc

SEQ ID NO: 55829 - DNA, 22 bp, synthetic construct
  misc_feature 1..22: note = chemically synthesized
  source 1..22: mol_type = other DNA
tagacctactcatcccagctgg

SEQ ID NO: 55830 - DNA, 22 bp, synthetic construct
  misc_feature 1..22: note = chemically synthesized
  source 1..22: mol_type = other DNA
agacctactcatcccagctggg

SEQ ID NO: 55831 - DNA, 22 bp, synthetic construct
  misc_feature 1..22: note = chemically synthesized
  source 1..22: mol_type = other DNA
gacctactcatcccagctggga

SEQ ID NO: 55832 - DNA, 22 bp, synthetic construct
  misc_feature 1..22: note = chemically synthesized
  source 1..22: mol_type = other DNA
ctcatcccagctgggagggtcc

SEQ ID NO: 55833 - DNA, 22 bp, synthetic construct
  misc_feature 1..22: note = chemically synthesized
  source 1..22: mol_type = other DNA
atcccagctgggagggtccaga

SEQ ID NO: 55834 - DNA, 22 bp, synthetic construct
  misc_feature 1..22: note = chemically synthesized
  source 1..22: mol_type = other DNA
ggagggtccagaagatacaccc

SEQ ID NO: 55835 - DNA, 22 bp, synthetic construct
  misc_feature 1..22: note = chemically synthesized
  source 1..22: mol_type = other DNA
ggccgaagctttgtgaaataga

SEQ ID NO: 55836 - DNA, 22 bp, synthetic construct
  misc_feature 1..22: note = chemically synthesized
  source 1..22: mol_type = other DNA
gccgaagctttgtgaaatagat

SEQ ID NO: 55837 - DNA, 22 bp, synthetic construct
  misc_feature 1..22: note = chemically synthesized
  source 1..22: mol_type = other DNA
tgtgaaatagatttgtgagagc

SEQ ID NO: 55838 - DNA, 22 bp, synthetic construct
  misc_feature 1..22: note = chemically synthesized
  source 1..22: mol_type = other DNA
gtgaaatagatttgtgagagca

SEQ ID NO: 55839 - DNA, 22 bp, synthetic construct
  misc_feature 1..22: note = chemically synthesized
  source 1..22: mol_type = other DNA
tgaaatagatttgtgagagcag

SEQ ID NO: 55840 - DNA, 22 bp, synthetic construct
  misc_feature 1..22: note = chemically synthesized
  source 1..22: mol_type = other DNA
gtgagagcagcacctgtatttt

SEQ ID NO: 55841 - DNA, 22 bp, synthetic construct
  misc_feature 1..22: note = chemically synthesized
  source 1..22: mol_type = other DNA
tgagagcagcacctgtattttt

SEQ ID NO: 55842 - DNA, 22 bp, synthetic construct
  misc_feature 1..22: note = chemically synthesized
  source 1..22: mol_type = other DNA
tatttttgaagagcccgtaatt

SEQ ID NO: 55843 - DNA, 22 bp, synthetic construct
  misc_feature 1..22: note = chemically synthesized
  source 1..22: mol_type = other DNA
ttgaagagcccgtaattgctct

SEQ ID NO: 55844 - DNA, 22 bp, synthetic construct
  misc_feature 1..22: note = chemically synthesized
  source 1..22: mol_type = other DNA
tgaagagcccgtaattgctctt

SEQ ID NO: 55845 - DNA, 22 bp, synthetic construct
  misc_feature 1..22: note = chemically synthesized
  source 1..22: mol_type = other DNA
gaagagcccgtaattgctcttc

SEQ ID NO: 55846 - DNA, 22 bp, synthetic construct
  misc_feature 1..22: note = chemically synthesized
  source 1..22: mol_type = other DNA
aagagcccgtaattgctcttct

SEQ ID NO: 55847 - DNA, 22 bp, synthetic construct
  misc_feature 1..22: note = chemically synthesized
  source 1..22: mol_type = other DNA
ctcttctctgtatgtcagatct

SEQ ID NO: 55848 - DNA, 22 bp, synthetic construct
  misc_feature 1..22: note = chemically synthesized
  source 1..22: mol_type = other DNA
ttctctgtatgtcagatctaac

SEQ ID NO: 55849 - DNA, 22 bp, synthetic construct
  misc_feature 1..22: note = chemically synthesized
  source 1..22: mol_type = other DNA
ctctgtatgtcagatctaacag

SEQ ID NO: 55850 - DNA, 22 bp, synthetic construct
  misc_feature 1..22: note = chemically synthesized
  source 1..22: mol_type = other DNA
tctgtatgtcagatctaacagt

SEQ ID NO: 55851 - DNA, 22 bp, synthetic construct
  misc_feature 1..22: note = chemically synthesized
  source 1..22: mol_type = other DNA
tgtatgtcagatctaacagtag

SEQ ID NO: 55852 - DNA, 22 bp, synthetic construct
  misc_feature 1..22: note = chemically synthesized
  source 1..22: mol_type = other DNA
tatgtcagatctaacagtagga

SEQ ID NO: 55853 - DNA, 22 bp, synthetic construct
  misc_feature 1..22: note = chemically synthesized
  source 1..22: mol_type = other DNA
acagtaggaaccacagtcactc

SEQ ID NO: 55854 - DNA, 22 bp, synthetic construct
  misc_feature 1..22: note = chemically synthesized
  source 1..22: mol_type = other DNA
aactacaaaatttaaatacaat

SEQ ID NO: 55855 - DNA, 22 bp, synthetic construct
  misc_feature 1..22: note = chemically synthesized
  source 1..22: mol_type = other DNA
caaaatttaaatacaatgggaa

SEQ ID NO: 55856 - DNA, 22 bp, synthetic construct
  misc_feature 1..22: note = chemically synthesized
  source 1..22: mol_type = other DNA
aaatacaatgggaataattgga

SEQ ID NO: 55857 - DNA, 22 bp, synthetic construct
  misc_feature 1..22: note = chemically synthesized
  source 1..22: mol_type = other DNA
aatacaatgggaataattggat

SEQ ID NO: 55858 - DNA, 22 bp, synthetic construct
  misc_feature 1..22: note = chemically synthesized
  source 1..22: mol_type = other DNA
gatcctgaggtggcaggggcca

SEQ ID NO: 55859 - DNA, 22 bp, synthetic construct
  misc_feature 1..22: note = chemically synthesized
  source 1..22: mol_type = other DNA
aggtggcaggggccaagtgttg

SEQ ID NO: 55860 - DNA, 22 bp, synthetic construct
  misc_feature 1..22: note = chemically synthesized
  source 1..22: mol_type = other DNA
gcactgaaccatcaaaggcaag

SEQ ID NO: 55861 - DNA, 22 bp, synthetic construct
  misc_feature 1..22: note = chemically synthesized
  source 1..22: mol_type = other DNA
aaccatcaaaggcaaggtgggc

SEQ ID NO: 55862 - DNA, 22 bp, synthetic construct
  misc_feature 1..22: note = chemically synthesized
  source 1..22: mol_type = other DNA
ccataatagacagcagaggcaa

SEQ ID NO: 55863 - DNA, 22 bp, synthetic construct
  misc_feature 1..22: note = chemically synthesized
  source 1..22: mol_type = other DNA
actcatgtagagctctggcatt

SEQ ID NO: 55864 - DNA, 22 bp, synthetic construct
  misc_feature 1..22: note = chemically synthesized
  source 1..22: mol_type = other DNA
atgtagagctctggcattggct

SEQ ID NO: 55865 - DNA, 22 bp, synthetic construct
  misc_feature 1..22: note = chemically synthesized
  source 1..22: mol_type = other DNA
tggcattggctaattaatcatg

SEQ ID NO: 55866 - DNA, 22 bp, synthetic construct
  misc_feature 1..22: note = chemically synthesized
  source 1..22: mol_type = other DNA
gcattggctaattaatcatggt

SEQ ID NO: 55867 - DNA, 22 bp, synthetic construct
  misc_feature 1..22: note = chemically synthesized
  source 1..22: mol_type = other DNA
gctaattaatcatggtgttcct

SEQ ID NO: 55868 - DNA, 22 bp, synthetic construct
  misc_feature 1..22: note = chemically synthesized
  source 1..22: mol_type = other DNA
attaatcatggtgttcctagaa

SEQ ID NO: 55869 - DNA, 22 bp, synthetic construct
  misc_feature 1..22: note = chemically synthesized
  source 1..22: mol_type = other DNA
atcatggtgttcctagaagtga

SEQ ID NO: 55870 - DNA, 22 bp, synthetic construct
  misc_feature 1..22: note = chemically synthesized
  source 1..22: mol_type = other DNA
ctagaagtgaaattgatgggaa

SEQ ID NO: 55871 - DNA, 22 bp, synthetic construct
  misc_feature 1..22: note = chemically synthesized
  source 1..22: mol_type = other DNA
gaagtgaaattgatgggaaacc

SEQ ID NO: 55872 - DNA, 22 bp, synthetic construct
  misc_feature 1..22: note = chemically synthesized
  source 1..22: mol_type = other DNA
atgggaaacctactgtattcct

SEQ ID NO: 55873 - DNA, 22 bp, synthetic construct
  misc_feature 1..22: note = chemically synthesized
  source 1..22: mol_type = other DNA
ctgtattcctacttgatttata

SEQ ID NO: 55874 - DNA, 22 bp, synthetic construct
  misc_feature 1..22: note = chemically synthesized
  source 1..22: mol_type = other DNA
tattcctacttgatttatataa

SEQ ID NO: 55875 - DNA, 22 bp, synthetic construct
  misc_feature 1..22: note = chemically synthesized
  source 1..22: mol_type = other DNA
ctacttgatttatataaacaaa

SEQ ID NO: 55876 - DNA, 22 bp, synthetic construct
  misc_feature 1..22: note = chemically synthesized
  source 1..22: mol_type = other DNA
cttgatttatataaacaaaaaa

SEQ ID NO: 55877 - DNA, 22 bp, synthetic construct
  misc_feature 1..22: note = chemically synthesized
  source 1..22: mol_type = other DNA
gatttatataaacaaaaaactg

SEQ ID NO: 55878 - DNA, 22 bp, synthetic construct
  misc_feature 1..22: note = chemically synthesized
  source 1..22: mol_type = other DNA
atttatataaacaaaaaactgc

SEQ ID NO: 55879 - DNA, 22 bp, synthetic construct
  misc_feature 1..22: note = chemically synthesized
  source 1..22: mol_type = other DNA
atataaacaaaaaactgccagg

SEQ ID NO: 55880 - DNA, 22 bp, synthetic construct
  misc_feature 1..22: note = chemically synthesized
  source 1..22: mol_type = other DNA
tataaacaaaaaactgccaggt

SEQ ID NO: 55881 - DNA, 22 bp, synthetic construct
  misc_feature 1..22: note = chemically synthesized
  source 1..22: mol_type = other DNA
ccaggtagaatggactaaagac

SEQ ID NO: 55882 - DNA, 22 bp, synthetic construct
  misc_feature 1..22: note = chemically synthesized
  source 1..22: mol_type = other DNA
aagactaatctgaattataaaa

SEQ ID NO: 55883 - DNA, 22 bp, synthetic construct
  misc_feature 1..22: note = chemically synthesized
  source 1..22: mol_type = other DNA
atctgaattataaaaacagaga

SEQ ID NO: 55884 - DNA, 22 bp, synthetic construct
  misc_feature 1..22: note = chemically synthesized
  source 1..22: mol_type = other DNA
aattataaaaacagagaatcat

SEQ ID NO: 55885 - DNA, 22 bp, synthetic construct
  misc_feature 1..22: note = chemically synthesized
  source 1..22: mol_type = other DNA
taaaaacagagaatcatgggcc

SEQ ID NO: 55886 - DNA, 22 bp, synthetic construct
  misc_feature 1..22: note = chemically synthesized
  source 1..22: mol_type = other DNA
aatcaatttccagactcgaacc

SEQ ID NO: 55887 - DNA, 22 bp, synthetic construct
  misc_feature 1..22: note = chemically synthesized
  source 1..22: mol_type = other DNA
ccagactcgaacctgttacagt

SEQ ID NO: 55888 - DNA, 22 bp, synthetic construct
  misc_feature 1..22: note = chemically synthesized
  source 1..22: mol_type = other DNA
cagactcgaacctgttacagtt

SEQ ID NO: 55889 - DNA, 22 bp, synthetic construct
  misc_feature 1..22: note = chemically synthesized
  source 1..22: mol_type = other DNA
gaacctgttacagttccagaac

SEQ ID NO: 55890 - DNA, 22 bp, synthetic construct
  misc_feature 1..22: note = chemically synthesized
  source 1..22: mol_type = other DNA
ttacagttccagaacccactga

SEQ ID NO: 55891 - DNA, 22 bp, synthetic construct
  misc_feature 1..22: note = chemically synthesized
  source 1..22: mol_type = other DNA
cagttccagaacccactgaatg

SEQ ID NO: 55892 - DNA, 22 bp, synthetic construct
  misc_feature 1..22: note = chemically synthesized
  source 1..22: mol_type = other DNA
cagaacccactgaatgaagggg

SEQ ID NO: 55893 - DNA, 22 bp, synthetic construct
  misc_feature 1..22: note = chemically synthesized
  source 1..22: mol_type = other DNA
aatgaaggggaggctggatccc

SEQ ID NO: 55894 - DNA, 22 bp, synthetic construct
  misc_feature 1..22: note = chemically synthesized
  source 1..22: mol_type = other DNA
gatccccttgaggaaggacacc

SEQ ID NO: 55895 - DNA, 22 bp, synthetic construct
  misc_feature 1..22: note = chemically synthesized
  source 1..22: mol_type = other DNA
gaggaaggacaccactaggcta

SEQ ID NO: 55896 - DNA, 22 bp, synthetic construct
  misc_feature 1..22: note = chemically synthesized
  source 1..22: mol_type = other DNA
aggaaggacaccactaggctac

SEQ ID NO: 55897 - DNA, 22 bp, synthetic construct
  misc_feature 1..22: note = chemically synthesized
  source 1..22: mol_type = other DNA
ggctactgacaacttatgctgt

SEQ ID NO: 55898 - DNA, 22 bp, synthetic construct
  misc_feature 1..22: note = chemically synthesized
  source 1..22: mol_type = other DNA
ctgacaacttatgctgttactc

SEQ ID NO: 55899 - DNA, 22 bp, synthetic construct
  misc_feature 1..22: note = chemically synthesized
  source 1..22: mol_type = other DNA
acaacttatgctgttactcttt

SEQ ID NO: 55900 - DNA, 22 bp, synthetic construct
  misc_feature 1..22: note = chemically synthesized
  source 1..22: mol_type = other DNA
atgctgttactctttctcccat

SEQ ID NO: 55901 - DNA, 22 bp, synthetic construct
  misc_feature 1..22: note = chemically synthesized
  source 1..22: mol_type = other DNA
tgctgttactctttctcccatc

SEQ ID NO: 55902 - DNA, 22 bp, synthetic construct
  misc_feature 1..22: note = chemically synthesized
  source 1..22: mol_type = other DNA
ttactctttctcccatccttcc

SEQ ID NO: 55903 - DNA, 22 bp, synthetic construct
  misc_feature 1..22: note = chemically synthesized
  source 1..22: mol_type = other DNA
ctctttctcccatccttcccta

SEQ ID NO: 55904 - DNA, 22 bp, synthetic construct
  misc_feature 1..22: note = chemically synthesized
  source 1..22: mol_type = other DNA
tttctcccatccttccctaagg

SEQ ID NO: 55905 - DNA, 22 bp, synthetic construct
  misc_feature 1..22: note = chemically synthesized
  source 1..22: mol_type = other DNA
tctcccatccttccctaaggag

SEQ ID NO: 55906 - DNA, 22 bp, synthetic construct
  misc_feature 1..22: note = chemically synthesized
  source 1..22: mol_type = other DNA
ctcccatccttccctaaggaga

SEQ ID NO: 55907 - DNA, 22 bp, synthetic construct
  misc_feature 1..22: note = chemically synthesized
  source 1..22: mol_type = other DNA
tcccatccttccctaaggagac

SEQ ID NO: 55908 - DNA, 22 bp, synthetic construct
  misc_feature 1..22: note = chemically synthesized
  source 1..22: mol_type = other DNA
ccatccttccctaaggagacct

SEQ ID NO: 55909 - DNA, 22 bp, synthetic construct
  misc_feature 1..22: note = chemically synthesized
  source 1..22: mol_type = other DNA
ccctaaggagacctctggcctt

SEQ ID NO: 55910 - DNA, 22 bp, synthetic construct
  misc_feature 1..22: note = chemically synthesized
  source 1..22: mol_type = other DNA
cctaaggagacctctggccttt

SEQ ID NO: 55911 - DNA, 22 bp, synthetic construct
  misc_feature 1..22: note = chemically synthesized
  source 1..22: mol_type = other DNA
aggagacctctggccttttacc

SEQ ID NO: 55912 - DNA, 22 bp, synthetic construct
  misc_feature 1..22: note = chemically synthesized
  source 1..22: mol_type = other DNA
tggccttttaccagggtaactg

SEQ ID NO: 55913 - DNA, 22 bp, synthetic construct
  misc_feature 1..22: note = chemically synthesized
  source 1..22: mol_type = other DNA
gccttttaccagggtaactgtg

SEQ ID NO: 55914 - DNA, 22 bp, synthetic construct
  misc_feature 1..22: note = chemically synthesized
  source 1..22: mol_type = other DNA
ttaccagggtaactgtgtgtac

SEQ ID NO: 55915 - DNA, 22 bp, synthetic construct
  misc_feature 1..22: note = chemically synthesized
  source 1..22: mol_type = other DNA
taccagggtaactgtgtgtact

SEQ ID NO: 55916 - DNA, 22 bp, synthetic construct
  misc_feature 1..22: note = chemically synthesized
  source 1..22: mol_type = other DNA
accagggtaactgtgtgtactg

SEQ ID NO: 55917 - DNA, 22 bp, synthetic construct
  misc_feature 1..22: note = chemically synthesized
  source 1..22: mol_type = other DNA
ccagggtaactgtgtgtactgg

SEQ ID NO: 55918 - DNA, 22 bp, synthetic construct
  misc_feature 1..22: note = chemically synthesized
  source 1..22: mol_type = other DNA
tgtgtactggagaaagggaagt

SEQ ID NO: 55919 - DNA, 22 bp, synthetic construct
  misc_feature 1..22: note = chemically synthesized
  source 1..22: mol_type = other DNA
gagaaagggaagtaatgagaca

SEQ ID NO: 55920 - DNA, 22 bp, synthetic construct
  misc_feature 1..22: note = chemically synthesized
  source 1..22: mol_type = other DNA
cagaaagtactggacactggct

SEQ ID NO: 55921 - DNA, 22 bp, synthetic construct
  misc_feature 1..22: note = chemically synthesized
  source 1..22: mol_type = other DNA
agaaagtactggacactggctc

SEQ ID NO: 55922 - DNA, 22 bp, synthetic construct
  misc_feature 1..22: note = chemically synthesized
  source 1..22: mol_type = other DNA
gacactggctctgagctgacgt

SEQ ID NO: 55923 - DNA, 22 bp, synthetic construct
  misc_feature 1..22: note = chemically synthesized
  source 1..22: mol_type = other DNA
gctctgagctgacgttgattcc

SEQ ID NO: 55924 - DNA, 22 bp, synthetic construct
  misc_feature 1..22: note = chemically synthesized
  source 1..22: mol_type = other DNA
tgagctgacgttgattccaggg

SEQ ID NO: 55925 - DNA, 22 bp, synthetic construct
  misc_feature 1..22: note = chemically synthesized
  source 1..22: mol_type = other DNA
agctgacgttgattccagggta

SEQ ID NO: 55926 - DNA, 22 bp, synthetic construct
  misc_feature 1..22: note = chemically synthesized
  source 1..22: mol_type = other DNA
acgttgattccagggtacccaa

SEQ ID NO: 55927 - DNA, 22 bp, synthetic construct
  misc_feature 1..22: note = chemically synthesized
  source 1..22: mol_type = other DNA
attccagggtacccaaaacgtt

SEQ ID NO: 55928 - DNA, 22 bp, synthetic construct
  misc_feature 1..22: note = chemically synthesized
  source 1..22: mol_type = other DNA
cagggtacccaaaacgttattg

SEQ ID NO: 55929 - DNA, 22 bp, synthetic construct
  misc_feature 1..22: note = chemically synthesized
  source 1..22: mol_type = other DNA
ttgtggttccccagttaaagta

SEQ ID NO: 55930 - DNA, 22 bp, synthetic construct
  misc_feature 1..22: note = chemically synthesized
  source 1..22: mol_type = other DNA
tggttccccagttaaagtaggg

SEQ ID NO: 55931 - DNA, 22 bp, synthetic construct
  misc_feature 1..22: note = chemically synthesized
  source 1..22: mol_type = other DNA
cccagttaaagtaggggcttat

SEQ ID NO: 55932 - DNA, 22 bp, synthetic construct
  misc_feature 1..22: note = chemically synthesized
  source 1..22: mol_type = other DNA
aagtaggggcttatggaggtta

SEQ ID NO: 55933 - DNA, 22 bp, synthetic construct
  misc_feature 1..22: note = chemically synthesized
  source 1..22: mol_type = other DNA
atggaggttaggtaattaatgg

SEQ ID NO: 55934 - DNA, 22 bp, synthetic construct
  misc_feature 1..22: note = chemically synthesized
  source 1..22: mol_type = other DNA
tggaggttaggtaattaatgga

SEQ ID NO: 55935 - DNA, 22 bp, synthetic construct
  misc_feature 1..22: note = chemically synthesized
  source 1..22: mol_type = other DNA
ggtaattaatggagttttagct

SEQ ID NO: 55936 - DNA, 22 bp, synthetic construct
  misc_feature 1..22: note = chemically synthesized
  source 1..22: mol_type = other DNA
atggagttttagctcatttctg

SEQ ID NO: 55937 - DNA, 22 bp, synthetic construct
  misc_feature 1..22: note = chemically synthesized
  source 1..22: mol_type = other DNA
tagctcatttctgacttacagt

SEQ ID NO: 55938 - DNA, 22 bp, synthetic construct
  misc_feature 1..22: note = chemically synthesized
  source 1..22: mol_type = other DNA
agctcatttctgacttacagtg

SEQ ID NO: 55939 - DNA, 22 bp, synthetic construct
  misc_feature 1..22: note = chemically synthesized
  source 1..22: mol_type = other DNA
gctcatttctgacttacagtgg

SEQ ID NO: 55940 - DNA, 22 bp, synthetic construct
  misc_feature 1..22: note = chemically synthesized
  source 1..22: mol_type = other DNA
atttctgacttacagtggttcc

SEQ ID NO: 55941 - DNA, 22 bp, synthetic construct
  misc_feature 1..22: note = chemically synthesized
  source 1..22: mol_type = other DNA
ctgacttacagtggttccagtg

SEQ ID NO: 55942 - DNA, 22 bp, synthetic construct
  misc_feature 1..22: note = chemically synthesized
  source 1..22: mol_type = other DNA
tgacttacagtggttccagtgg

SEQ ID NO: 55943 - DNA, 22 bp, synthetic construct
  misc_feature 1..22: note = chemically synthesized
  source 1..22: mol_type = other DNA
acttacagtggttccagtgggt

SEQ ID NO: 55944 - DNA, 22 bp, synthetic construct
  misc_feature 1..22: note = chemically synthesized
  source 1..22: mol_type = other DNA
acagtggttccagtgggtccct

SEQ ID NO: 55945 - DNA, 22 bp, synthetic construct
  misc_feature 1..22: note = chemically synthesized
  source 1..22: mol_type = other DNA
cagtggttccagtgggtccctg

SEQ ID NO: 55946 - DNA, 22 bp, synthetic construct
  misc_feature 1..22: note = chemically synthesized
  source 1..22: mol_type = other DNA
cagtgggtccctggacttatcc

SEQ ID NO: 55947 - DNA, 22 bp, synthetic construct
  misc_feature 1..22: note = chemically synthesized
  source 1..22: mol_type = other DNA
gacttatcctctggtcattttc

SEQ ID NO: 55948 - DNA, 22 bp, synthetic construct
  misc_feature 1..22: note = chemically synthesized
  source 1..22: mol_type = other DNA
atcctctggtcattttcccagt

SEQ ID NO: 55949 - DNA, 22 bp, synthetic construct
  misc_feature 1..22: note = chemically synthesized
  source 1..22: mol_type = other DNA
tcctctggtcattttcccagtg

SEQ ID NO: 55950 - DNA, 22 bp, synthetic construct
  misc_feature 1..22: note = chemically synthesized
  source 1..22: mol_type = other DNA
tggtcattttcccagtgccaaa

SEQ ID NO: 55951 - DNA, 22 bp, synthetic construct
  misc_feature 1..22: note = chemically synthesized
  source 1..22: mol_type = other DNA
gtcattttcccagtgccaaaat

SEQ ID NO: 55952 - DNA, 22 bp, synthetic construct
  misc_feature 1..22: note = chemically synthesized
  source 1..22: mol_type = other DNA
tcccagtgccaaaatgcataat

SEQ ID NO: 55953 - DNA, 22 bp, synthetic construct
  misc_feature 1..22: note = chemically synthesized
  source 1..22: mol_type = other DNA
cccagtgccaaaatgcataatt

SEQ ID NO: 55954 - DNA, 22 bp, synthetic construct
  misc_feature 1..22: note = chemically synthesized
  source 1..22: mol_type = other DNA
ccagtgccaaaatgcataattt

SEQ ID NO: 55955 - DNA, 22 bp, synthetic construct
  misc_feature 1..22: note = chemically synthesized
  source 1..22: mol_type = other DNA
gtatagacatacttattagctg

SEQ ID NO: 55956 - DNA, 22 bp, synthetic construct
  misc_feature 1..22: note = chemically synthesized
  source 1..22: mol_type = other DNA
tatagacatacttattagctgg

SEQ ID NO: 55957 - DNA, 22 bp, synthetic construct
  misc_feature 1..22: note = chemically synthesized
  source 1..22: mol_type = other DNA
attagctggcagaaatgccaca

SEQ ID NO: 55958 - DNA, 22 bp, synthetic construct
  misc_feature 1..22: note = chemically synthesized
  source 1..22: mol_type = other DNA
ttagctggcagaaatgccacat

SEQ ID NO: 55959 - DNA, 22 bp, synthetic construct
  misc_feature 1..22: note = chemically synthesized
  source 1..22: mol_type = other DNA
gctggcagaaatgccacattgg

SEQ ID NO: 55960 - DNA, 22 bp, synthetic construct
  misc_feature 1..22: note = chemically synthesized
  source 1..22: mol_type = other DNA
gcagaaatgccacattggctcc

SEQ ID NO: 55961 - DNA, 22 bp, synthetic construct
  misc_feature 1..22: note = chemically synthesized
  source 1..22: mol_type = other DNA
gctccctgactggtaggatgag

SEQ ID NO: 55962 - DNA, 22 bp, synthetic construct
  misc_feature 1..22: note = chemically synthesized
  source 1..22: mol_type = other DNA
cctgactggtaggatgagggct

SEQ ID NO: 55963 - DNA, 22 bp, synthetic construct
  misc_feature 1..22: note = chemically synthesized
  source 1..22: mol_type = other DNA
actggtaggatgagggctatta

SEQ ID NO: 55964 - DNA, 22 bp, synthetic construct
  misc_feature 1..22: note = chemically synthesized
  source 1..22: mol_type = other DNA
gtaggatgagggctattatggt

SEQ ID NO: 55965 - DNA, 22 bp, synthetic construct
  misc_feature 1..22: note = chemically synthesized
  source 1..22: mol_type = other DNA
ttatggtgggaaaggccaaaca

SEQ ID NO: 55966 - DNA, 22 bp, synthetic construct
  misc_feature 1..22: note = chemically synthesized
  source 1..22: mol_type = other DNA
tggtgggaaaggccaaacagaa

SEQ ID NO: 55967 - DNA, 22 bp, synthetic construct
  misc_feature 1..22: note = chemically synthesized
  source 1..22: mol_type = other DNA
gagctgtctctacctagaaaaa

SEQ ID NO: 55968 - DNA, 22 bp, synthetic construct
  misc_feature 1..22: note = chemically synthesized
  source 1..22: mol_type = other DNA
tctctacctagaaaaataaaaa

SEQ ID NO: 55969 - DNA, 22 bp, synthetic construct
  misc_feature 1..22: note = chemically synthesized
  source 1..22: mol_type = other DNA
tacctagaaaaataaaaaaatc

SEQ ID NO: 55970 - DNA, 22 bp, synthetic construct
  misc_feature 1..22: note = chemically synthesized
  source 1..22: mol_type = other DNA
cctagaaaaataaaaaaatcaa

SEQ ID NO: 55971 - DNA, 22 bp, synthetic construct
  misc_feature 1..22: note = chemically synthesized
  source 1..22: mol_type = other DNA
gaaaaataaaaaaatcaaaaac

SEQ ID NO: 55972 - DNA, 22 bp, synthetic construct
  misc_feature 1..22: note = chemically synthesized
  source 1..22: mol_type = other DNA
gagggactgaagtgattagtgt

SEQ ID NO: 55973 - DNA, 22 bp, synthetic construct
  misc_feature 1..22: note = chemically synthesized
  source 1..22: mol_type = other DNA
aagtgattagtgtcaccatcaa

SEQ ID NO: 55974 - DNA, 22 bp, synthetic construct
  misc_feature 1..22: note = chemically synthesized
  source 1..22: mol_type = other DNA
gtgtcaccatcaaggacttgaa

SEQ ID NO: 55975 - DNA, 22 bp, synthetic construct
  misc_feature 1..22: note = chemically synthesized
  source 1..22: mol_type = other DNA
gaaagacgcaggggtggtgatt

SEQ ID NO: 55976 - DNA, 22 bp, synthetic construct
  misc_feature 1..22: note = chemically synthesized
  source 1..22: mol_type = other DNA
aaagacgcaggggtggtgattc

SEQ ID NO: 55977 - DNA, 22 bp, synthetic construct
  misc_feature 1..22: note = chemically synthesized
  source 1..22: mol_type = other DNA
ccaccacatccctgttcaactc

SEQ ID NO: 55978 - DNA, 22 bp, synthetic construct
  misc_feature 1..22: note = chemically synthesized
  source 1..22: mol_type = other DNA
ttcaactctcccatttgacctg

SEQ ID NO: 55979 - DNA, 22 bp, synthetic construct
  misc_feature 1..22: note = chemically synthesized
  source 1..22: mol_type = other DNA
aactctcccatttgacctgtgc

SEQ ID NO: 55980 - DNA, 22 bp, synthetic construct
  misc_feature 1..22: note = chemically synthesized
  source 1..22: mol_type = other DNA
tcccatttgacctgtgcagagg

SEQ ID NO: 55981 - DNA, 22 bp, synthetic construct
  misc_feature 1..22: note = chemically synthesized
  source 1..22: mol_type = other DNA
ccatttgacctgtgcagaggac

SEQ ID NO: 55982 - DNA, 22 bp, synthetic construct
  misc_feature 1..22: note = chemically synthesized
  source 1..22: mol_type = other DNA
gacctgtgcagaggacagatgg

SEQ ID NO: 55983 - DNA, 22 bp, synthetic construct
  misc_feature 1..22: note = chemically synthesized
  source 1..22: mol_type = other DNA
acctgtgcagaggacagatgga

SEQ ID NO: 55984 - DNA, 22 bp, synthetic construct
  misc_feature 1..22: note = chemically synthesized
  source 1..22: mol_type = other DNA
tgcagaggacagatggatcttg

SEQ ID NO: 55985 - DNA, 22 bp, synthetic construct
  misc_feature 1..22: note = chemically synthesized
  source 1..22: mol_type = other DNA
ggaaaatgatggtggattattt

SEQ ID NO: 55986 - DNA, 22 bp, synthetic construct
  misc_feature 1..22: note = chemically synthesized
  source 1..22: mol_type = other DNA
gaaaatgatggtggattatttt

SEQ ID NO: 55987 - DNA, 22 bp, synthetic construct
  misc_feature 1..22: note = chemically synthesized
  source 1..22: mol_type = other DNA
ttttaagcttaaccaagtggtg

SEQ ID NO: 55988 - DNA, 22 bp, synthetic construct
  misc_feature 1..22: note = chemically synthesized
  source 1..22: mol_type = other DNA
taagcttaaccaagtggtgact

SEQ ID NO: 55989 - DNA, 22 bp, synthetic construct
  misc_feature 1..22: note = chemically synthesized
  source 1..22: mol_type = other DNA
aagcttaaccaagtggtgactc

SEQ ID NO: 55990 - DNA, 22 bp, synthetic construct
  misc_feature 1..22: note = chemically synthesized
  source 1..22: mol_type = other DNA
agcttaaccaagtggtgactcc

SEQ ID NO: 55991 - DNA, 22 bp, synthetic construct
  misc_feature 1..22: note = chemically synthesized
  source 1..22: mol_type = other DNA
aaccaagtggtgactccaattg

SEQ ID NO: 55992 - DNA, 22 bp, synthetic construct
  misc_feature 1..22: note = chemically synthesized
  source 1..22: mol_type = other DNA
accaagtggtgactccaattgc

SEQ ID NO: 55993 - DNA, 22 bp, synthetic construct
  misc_feature 1..22: note = chemically synthesized
  source 1..22: mol_type = other DNA
caattgcagctgctctaccagt

SEQ ID NO: 55994 - DNA, 22 bp, synthetic construct
  misc_feature 1..22: note = chemically synthesized
  source 1..22: mol_type = other DNA
cagctgctctaccagttgtggt

SEQ ID NO: 55995 - DNA, 22 bp, synthetic construct
  misc_feature 1..22: note = chemically synthesized
  source 1..22: mol_type = other DNA
ctctaccagttgtggttttgtt

SEQ ID NO: 55996 - DNA, 22 bp, synthetic construct
  misc_feature 1..22: note = chemically synthesized
  source 1..22: mol_type = other DNA
taccagttgtggttttgttgct

SEQ ID NO: 55997 - DNA, 22 bp, synthetic construct
  misc_feature 1..22: note = chemically synthesized
  source 1..22: mol_type = other DNA
ccagttgtggttttgttgcttg

SEQ ID NO: 55998 - DNA, 22 bp, synthetic construct
  misc_feature 1..22: note = chemically synthesized
  source 1..22: mol_type = other DNA
tggttttgttgcttgagcaaat

SEQ ID NO: 55999 - DNA, 22 bp, synthetic construct
  misc_feature 1..22: note = chemically synthesized
  source 1..22: mol_type = other DNA
tgttgcttgagcaaattaacac

SEQ ID NO: 56000 - DNA, 22 bp, synthetic construct
  misc_feature 1..22: note = chemically synthesized
  source 1..22: mol_type = other DNA
gttgcttgagcaaattaacaca

SEQ ID NO: 56001 - DNA, 22 bp, synthetic construct
  misc_feature 1..22: note = chemically synthesized
  source 1..22: mol_type = other DNA
ttgcttgagcaaattaacacat

SEQ ID NO: 56002 - DNA, 22 bp, synthetic construct
  misc_feature 1..22: note = chemically synthesized
  source 1..22: mol_type = other DNA
cttgagcaaattaacacatctc

SEQ ID NO: 56003 - DNA, 22 bp, synthetic construct
  misc_feature 1..22: note = chemically synthesized
  source 1..22: mol_type = other DNA
gagcaaattaacacatctcctg

SEQ ID NO: 56004 - DNA, 22 bp, synthetic construct
  misc_feature 1..22: note = chemically synthesized
  source 1..22: mol_type = other DNA
agcaaattaacacatctcctgg

SEQ ID NO: 56005 - DNA, 22 bp, synthetic construct
  misc_feature 1..22: note = chemically synthesized
  source 1..22: mol_type = other DNA
acacatctcctggtgcctggta

SEQ ID NO: 56006 - DNA, 22 bp, synthetic construct
  misc_feature 1..22: note = chemically synthesized
  source 1..22: mol_type = other DNA
ctggtgcctggtatgcagccat

SEQ ID NO: 56007 - DNA, 22 bp, synthetic construct
  misc_feature 1..22: note = chemically synthesized
  source 1..22: mol_type = other DNA
gtgcctggtatgcagccattgg

SEQ ID NO: 56008 - DNA, 22 bp, synthetic construct
  misc_feature 1..22: note = chemically synthesized
  source 1..22: mol_type = other DNA
gtatgcagccattggcttggca

SEQ ID NO: 56009 - DNA, 22 bp, synthetic construct
  misc_feature 1..22: note = chemically synthesized
  source 1..22: mol_type = other DNA
gcttggcaagtggctttttctc

SEQ ID NO: 56010 - DNA, 22 bp, synthetic construct
  misc_feature 1..22: note = chemically synthesized
  source 1..22: mol_type = other DNA
ggcaagtggctttttctccatt

SEQ ID NO: 56011 - DNA, 22 bp, synthetic construct
  misc_feature 1..22: note = chemically synthesized
  source 1..22: mol_type = other DNA
gcaagtggctttttctccattc

SEQ ID NO: 56012 - DNA, 22 bp, synthetic construct
  misc_feature 1..22: note = chemically synthesized
  source 1..22: mol_type = other DNA
tttctccattcctgtccataag

SEQ ID NO: 56013 - DNA, 22 bp, synthetic construct
  misc_feature 1..22: note = chemically synthesized
  source 1..22: mol_type = other DNA
ttctccattcctgtccataaga

SEQ ID NO: 56014 - DNA, 22 bp, synthetic construct
  misc_feature 1..22: note = chemically synthesized
  source 1..22: mol_type = other DNA
tctccattcctgtccataagac

SEQ ID NO: 56015 - DNA, 22 bp, synthetic construct
  misc_feature 1..22: note = chemically synthesized
  source 1..22: mol_type = other DNA
ctccattcctgtccataagacc

SEQ ID NO: 56016 - DNA, 22 bp, synthetic construct
  misc_feature 1..22: note = chemically synthesized
  source 1..22: mol_type = other DNA
tccattcctgtccataagaccc

SEQ ID NO: 56017 - DNA, 22 bp, synthetic construct
  misc_feature 1..22: note = chemically synthesized
  source 1..22: mol_type = other DNA
cattcctgtccataagacccac

SEQ ID NO: 56018 - DNA, 22 bp, synthetic construct
  misc_feature 1..22: note = chemically synthesized
  source 1..22: mol_type = other DNA
ctgtccataagacccaccagaa

SEQ ID NO: 56019 - DNA, 22 bp, synthetic construct
  misc_feature 1..22: note = chemically synthesized
  source 1..22: mol_type = other DNA
tccataagacccaccagaagca

SEQ ID NO: 56020 - DNA, 22 bp, synthetic construct
  misc_feature 1..22: note = chemically synthesized
  source 1..22: mol_type = other DNA
gccttcagctgacaaggccagc

SEQ ID NO: 56021 - DNA, 22 bp, synthetic construct
  misc_feature 1..22: note = chemically synthesized
  source 1..22: mol_type = other DNA
ccttcagctgacaaggccagca

SEQ ID NO: 56022 - DNA, 22 bp, synthetic construct
  misc_feature 1..22: note = chemically synthesized
  source 1..22: mol_type = other DNA
cagctgacaaggccagcattat

SEQ ID NO: 56023 - DNA, 22 bp, synthetic construct
  misc_feature 1..22: note = chemically synthesized
  source 1..22: mol_type = other DNA
agctgacaaggccagcattata

SEQ ID NO: 56024 - DNA, 22 bp, synthetic construct
  misc_feature 1..22: note = chemically synthesized
  source 1..22: mol_type = other DNA
acaaggccagcattataccttt

SEQ ID NO: 56025 - DNA, 22 bp, synthetic construct
  misc_feature 1..22: note = chemically synthesized
  source 1..22: mol_type = other DNA
tacctttaccaccctacctcag

SEQ ID NO: 56026 - DNA, 22 bp, synthetic construct
  misc_feature 1..22: note = chemically synthesized
  source 1..22: mol_type = other DNA
taccaccctacctcaggggtgt

SEQ ID NO: 56027 - DNA, 22 bp, synthetic construct
  misc_feature 1..22: note = chemically synthesized
  source 1..22: mol_type = other DNA
accaccctacctcaggggtgta

SEQ ID NO: 56028 - DNA, 22 bp, synthetic construct
  misc_feature 1..22: note = chemically synthesized
  source 1..22: mol_type = other DNA
ccaccctacctcaggggtgtat

SEQ ID NO: 56029 - DNA, 22 bp, synthetic construct
  misc_feature 1..22: note = chemically synthesized
  source 1..22: mol_type = other DNA
cctcaggggtgtatcaactctc

SEQ ID NO: 56030 - DNA, 22 bp, synthetic construct
  misc_feature 1..22: note = chemically synthesized
  source 1..22: mol_type = other DNA
aggggtgtatcaactctccagc

SEQ ID NO: 56031 - DNA, 22 bp, synthetic construct
  misc_feature 1..22: note = chemically synthesized
  source 1..22: mol_type = other DNA
tccagctttgtgtcataatctt

SEQ ID NO: 56032 - DNA, 22 bp, synthetic construct
  misc_feature 1..22: note = chemically synthesized
  source 1..22: mol_type = other DNA
cagctttgtgtcataatcttat

SEQ ID NO: 56033 - DNA, 22 bp, synthetic construct
  misc_feature 1..22: note = chemically synthesized
  source 1..22: mol_type = other DNA
tgtgtcataatcttatttggag

SEQ ID NO: 56034 - DNA, 22 bp, synthetic construct
  misc_feature 1..22: note = chemically synthesized
  source 1..22: mol_type = other DNA
gtgtcataatcttatttggaga

SEQ ID NO: 56035 - DNA, 22 bp, synthetic construct
  misc_feature 1..22: note = chemically synthesized
  source 1..22: mol_type = other DNA
tgtcataatcttatttggagag

SEQ ID NO: 56036 - DNA, 22 bp, synthetic construct
  misc_feature 1..22: note = chemically synthesized
  source 1..22: mol_type = other DNA
atttggagagaccttgctcgct

SEQ ID NO: 56037 - DNA, 22 bp, synthetic construct
  misc_feature 1..22: note = chemically synthesized
  source 1..22: mol_type = other DNA
tttggagagaccttgctcgctt

SEQ ID NO: 56038 - DNA, 22 bp, synthetic construct
  misc_feature 1..22: note = chemically synthesized
  source 1..22: mol_type = other DNA
ggagagaccttgctcgcttttc

SEQ ID NO: 56039 - DNA, 22 bp, synthetic construct
  misc_feature 1..22: note = chemically synthesized
  source 1..22: mol_type = other DNA
gagagaccttgctcgcttttca

SEQ ID NO: 56040 - DNA, 22 bp, synthetic construct
  misc_feature 1..22: note = chemically synthesized
  source 1..22: mol_type = other DNA
gctcgcttttcacttccacgag

SEQ ID NO: 56041 - DNA, 22 bp, synthetic construct
  misc_feature 1..22: note = chemically synthesized
  source 1..22: mol_type = other DNA
ctcgcttttcacttccacgaga

SEQ ID NO: 56042 - DNA, 22 bp, synthetic construct
  misc_feature 1..22: note = chemically synthesized
  source 1..22: mol_type = other DNA
gcttttcacttccacgagatat

SEQ ID NO: 56043 - DNA, 22 bp, synthetic construct
  misc_feature 1..22: note = chemically synthesized
  source 1..22: mol_type = other DNA
ttcacttccacgagatataaca

SEQ ID NO: 56044 - DNA, 22 bp, synthetic construct
  misc_feature 1..22: note = chemically synthesized
  source 1..22: mol_type = other DNA
tcacttccacgagatataacac

SEQ ID NO: 56045 - DNA, 22 bp, synthetic construct
  misc_feature 1..22: note = chemically synthesized
  source 1..22: mol_type = other DNA
cacttccacgagatataacact

SEQ ID NO: 56046 - DNA, 22 bp, synthetic construct
  misc_feature 1..22: note = chemically synthesized
  source 1..22: mol_type = other DNA
acttccacgagatataacactg

SEQ ID NO: 56047 - DNA, 22 bp, synthetic construct
  misc_feature 1..22: note = chemically synthesized
  source 1..22: mol_type = other DNA
ccacgagatataacactggtcc

SEQ ID NO: 56048 - DNA, 22 bp, synthetic construct
  misc_feature 1..22: note = chemically synthesized
  source 1..22: mol_type = other DNA
cacgagatataacactggtcca

SEQ ID NO: 56049 - DNA, 22 bp, synthetic construct
  misc_feature 1..22: note = chemically synthesized
  source 1..22: mol_type = other DNA
gtccattacattcatgacatta

SEQ ID NO: 56050 - DNA, 22 bp, synthetic construct
  misc_feature 1..22: note = chemically synthesized
  source 1..22: mol_type = other DNA
cattcatgacattatgatgatt

SEQ ID NO: 56051 - DNA, 22 bp, synthetic construct
  misc_feature 1..22: note = chemically synthesized
  source 1..22: mol_type = other DNA
atgacattatgatgattggata

SEQ ID NO: 56052 - DNA, 22 bp, synthetic construct
  misc_feature 1..22: note = chemically synthesized
  source 1..22: mol_type = other DNA
tgatgattggatacagtgagca

SEQ ID NO: 56053 - DNA, 22 bp, synthetic construct
  misc_feature 1..22: note = chemically synthesized
  source 1..22: mol_type = other DNA
gatacagtgagcaagaagtagc

SEQ ID NO: 56054 - DNA, 22 bp, synthetic construct
  misc_feature 1..22: note = chemically synthesized
  source 1..22: mol_type = other DNA
aacttattggtgagacatttgt

SEQ ID NO: 56055 - DNA, 22 bp, synthetic construct
  misc_feature 1..22: note = chemically synthesized
  source 1..22: mol_type = other DNA
attggtgagacatttgtatgcc

SEQ ID NO: 56056 - DNA, 22 bp, synthetic construct
  misc_feature 1..22: note = chemically synthesized
  source 1..22: mol_type = other DNA
ttggtgagacatttgtatgcca

SEQ ID NO: 56057 - DNA, 22 bp, synthetic construct
  misc_feature 1..22: note = chemically synthesized
  source 1..22: mol_type = other DNA
gtgagacatttgtatgccagag

SEQ ID NO: 56058 - DNA, 22 bp, synthetic construct
  misc_feature 1..22: note = chemically synthesized
  source 1..22: mol_type = other DNA
gtatgccagaggatgggaaata

SEQ ID NO: 56059 - DNA, 22 bp, synthetic construct
  misc_feature 1..22: note = chemically synthesized
  source 1..22: mol_type = other DNA
tatgccagaggatgggaaataa

SEQ ID NO: 56060 - DNA, 22 bp, synthetic construct
  misc_feature 1..22: note = chemically synthesized
  source 1..22: mol_type = other DNA
aaatttagggactttctacctc

SEQ ID NO: 56061 - DNA, 22 bp, synthetic construct
  misc_feature 1..22: note = chemically synthesized
  source 1..22: mol_type = other DNA
agggactttctacctcggtaaa

SEQ ID NO: 56062 - DNA, 22 bp, synthetic construct
  misc_feature 1..22: note = chemically synthesized
  source 1..22: mol_type = other DNA
gggactttctacctcggtaaaa

SEQ ID NO: 56063 - DNA, 22 bp, synthetic construct
  misc_feature 1..22: note = chemically synthesized
  source 1..22: mol_type = other DNA
tctacctcggtaaaatttctag

SEQ ID NO: 56064 - DNA, 22 bp, synthetic construct
  misc_feature 1..22: note = chemically synthesized
  source 1..22: mol_type = other DNA
ctacctcggtaaaatttctagg

SEQ ID NO: 56065 - DNA, 22 bp, synthetic construct
  misc_feature 1..22: note = chemically synthesized
  source 1..22: mol_type = other DNA
tacctcggtaaaatttctaggg

SEQ ID NO: 56066 - DNA, 22 bp, synthetic construct
  misc_feature 1..22: note = chemically synthesized
  source 1..22: mol_type = other DNA
cctcggtaaaatttctagggtt

SEQ ID NO: 56067 - DNA, 22 bp, synthetic construct
  misc_feature 1..22: note = chemically synthesized
  source 1..22: mol_type = other DNA
ggtaaaatttctagggttccag

SEQ ID NO: 56068 - DNA, 22 bp, synthetic construct
  misc_feature 1..22: note = chemically synthesized
  source 1..22: mol_type = other DNA
ctagggttccagtggcatgaga

SEQ ID NO: 56069 - DNA, 22 bp, synthetic construct
  misc_feature 1..22: note = chemically synthesized
  source 1..22: mol_type = other DNA
tagggttccagtggcatgagac

SEQ ID NO: 56070 - DNA, 22 bp, synthetic construct
  misc_feature 1..22: note = chemically synthesized
  source 1..22: mol_type = other DNA
gggttccagtggcatgagacct

SEQ ID NO: 56071 - DNA, 22 bp, synthetic construct
  misc_feature 1..22: note = chemically synthesized
  source 1..22: mol_type = other DNA
cagtggcatgagacctatggag

SEQ ID NO: 56072 - DNA, 22 bp, synthetic construct
  misc_feature 1..22: note = chemically synthesized
  source 1..22: mol_type = other DNA
tggagatattccttctaaggtg

SEQ ID NO: 56073 - DNA, 22 bp, synthetic construct
  misc_feature 1..22: note = chemically synthesized
  source 1..22: mol_type = other DNA
cttctaaggtgaagcataactt

SEQ ID NO: 56074 - DNA, 22 bp, synthetic construct
  misc_feature 1..22: note = chemically synthesized
  source 1..22: mol_type = other DNA
ctaaggtgaagcataacttgct

SEQ ID NO: 56075 - DNA, 22 bp, synthetic construct
  misc_feature 1..22: note = chemically synthesized
  source 1..22: mol_type = other DNA
taaggtgaagcataacttgctg

SEQ ID NO: 56076 - DNA, 22 bp, synthetic construct
  misc_feature 1..22: note = chemically synthesized
  source 1..22: mol_type = other DNA
aggtgaagcataacttgctgcg

SEQ ID NO: 56077 - DNA, 22 bp, synthetic construct
  misc_feature 1..22: note = chemically synthesized
  source 1..22: mol_type = other DNA
gctgcgtttggcccctcttaca

SEQ ID NO: 56078 - DNA, 22 bp, synthetic construct
  misc_feature 1..22: note = chemically synthesized
  source 1..22: mol_type = other DNA
ctgcgtttggcccctcttacaa

SEQ ID NO: 56079 - DNA, 22 bp, synthetic construct
  misc_feature 1..22: note = chemically synthesized
  source 1..22: mol_type = other DNA
cgtttggcccctcttacaacca

SEQ ID NO: 56080 - DNA, 22 bp, synthetic construct
  misc_feature 1..22: note = chemically synthesized
  source 1..22: mol_type = other DNA
ggcccctcttacaaccaagaaa

SEQ ID NO: 56081 - DNA, 22 bp, synthetic construct
  misc_feature 1..22: note = chemically synthesized
  source 1..22: mol_type = other DNA
gcccctcttacaaccaagaaag

SEQ ID NO: 56082 - DNA, 22 bp, synthetic construct
  misc_feature 1..22: note = chemically synthesized
  source 1..22: mol_type = other DNA
ttacaaccaagaaagaggcaca

SEQ ID NO: 56083 - DNA, 22 bp, synthetic construct
  misc_feature 1..22: note = chemically synthesized
  source 1..22: mol_type = other DNA
acaaccaagaaagaggcacaat

SEQ ID NO: 56084 - DNA, 22 bp, synthetic construct
  misc_feature 1..22: note = chemically synthesized
  source 1..22: mol_type = other DNA
caaccaagaaagaggcacaatg

SEQ ID NO: 56085 - DNA, 22 bp, synthetic construct
  misc_feature 1..22: note = chemically synthesized
  source 1..22: mol_type = other DNA
gtgggcctatttggattttgga

SEQ ID NO: 56086 - DNA, 22 bp, synthetic construct
  misc_feature 1..22: note = chemically synthesized
  source 1..22: mol_type = other DNA
tttggattttggaggcaacaca

SEQ ID NO: 56087 - DNA, 22 bp, synthetic construct
  misc_feature 1..22: note = chemically synthesized
  source 1..22: mol_type = other DNA
ggattttggaggcaacacattc

SEQ ID NO: 56088 - DNA, 22 bp, synthetic construct
  misc_feature 1..22: note = chemically synthesized
  source 1..22: mol_type = other DNA
gattttggaggcaacacattcc

SEQ ID NO: 56089 - DNA, 22 bp, synthetic construct
  misc_feature 1..22: note = chemically synthesized
  source 1..22: mol_type = other DNA
tggaggcaacacattcctcgtt

SEQ ID NO: 56090 - DNA, 22 bp, synthetic construct
  misc_feature 1..22: note = chemically synthesized
  source 1..22: mol_type = other DNA
ggaggcaacacattcctcgttt

SEQ ID NO: 56091 - DNA, 22 bp, synthetic construct
  misc_feature 1..22: note = chemically synthesized
  source 1..22: mol_type = other DNA
gaggcaacacattcctcgtttg

SEQ ID NO: 56092 - DNA, 22 bp, synthetic construct
  misc_feature 1..22: note = chemically synthesized
  source 1..22: mol_type = other DNA
ctcgtttgggtgtgttactctg

SEQ ID NO: 56093 - DNA, 22 bp, synthetic construct
  misc_feature 1..22: note = chemically synthesized
  source 1..22: mol_type = other DNA
gtttgggtgtgttactctggcc

SEQ ID NO: 56094 - DNA, 22 bp, synthetic construct
  misc_feature 1..22: note = chemically synthesized
  source 1..22: mol_type = other DNA
gggtgtgttactctggcccatt

SEQ ID NO: 56095 - DNA, 22 bp, synthetic construct
  misc_feature 1..22: note = chemically synthesized
  source 1..22: mol_type = other DNA
ggtgtgttactctggcccattt

SEQ ID NO: 56096 - DNA, 22 bp, synthetic construct
  misc_feature 1..22: note = chemically synthesized
  source 1..22: mol_type = other DNA
ctctggcccatttatcgagtga

SEQ ID NO: 56097 - DNA, 22 bp, synthetic construct
  misc_feature 1..22: note = chemically synthesized
  source 1..22: mol_type = other DNA
tggcccatttatcgagtgacct

SEQ ID NO: 56098 - DNA, 22 bp, synthetic construct
  misc_feature 1..22: note = chemically synthesized
  source 1..22: mol_type = other DNA
gcccatttatcgagtgacctga

SEQ ID NO: 56099 - DNA, 22 bp, synthetic construct
  misc_feature 1..22: note = chemically synthesized
  source 1..22: mol_type = other DNA
atcgagtgacctgaaaggctgc

SEQ ID NO: 56100 - DNA, 22 bp, synthetic construct
  misc_feature 1..22: note = chemically synthesized
  source 1..22: mol_type = other DNA
tcgagtgacctgaaaggctgcc

SEQ ID NO: 56101 - DNA, 22 bp, synthetic construct
  misc_feature 1..22: note = chemically synthesized
  source 1..22: mol_type = other DNA
aaaggctgccagatttaagtgc

SEQ ID NO: 56102 - DNA, 22 bp, synthetic construct
  misc_feature 1..22: note = chemically synthesized
  source 1..22: mol_type = other DNA
ccagatttaagtgcagtctaga

SEQ ID NO: 56103 - DNA, 22 bp, synthetic construct
  misc_feature 1..22: note = chemically synthesized
  source 1..22: mol_type = other DNA
aagtgcagtctagaacaaaaga

SEQ ID NO: 56104 - DNA, 22 bp, synthetic construct
  misc_feature 1..22: note = chemically synthesized
  source 1..22: mol_type = other DNA
agtgcagtctagaacaaaagaa

SEQ ID NO: 56105 - DNA, 22 bp, synthetic construct
  misc_feature 1..22: note = chemically synthesized
  source 1..22: mol_type = other DNA
gaacaaaagaaggctctgaaac

SEQ ID NO: 56106 - DNA, 22 bp, synthetic construct
  misc_feature 1..22: note = chemically synthesized
  source 1..22: mol_type = other DNA
tgaaacaggtccaggctgctgt

SEQ ID NO: 56107 - DNA, 22 bp, synthetic construct
  misc_feature 1..22: note = chemically synthesized
  source 1..22: mol_type = other DNA
aaacaggtccaggctgctgtga

SEQ ID NO: 56108 - DNA, 22 bp, synthetic construct
  misc_feature 1..22: note = chemically synthesized
  source 1..22: mol_type = other DNA
ctgtgaaagctgctctgccatt

SEQ ID NO: 56109 - DNA, 22 bp, synthetic construct
  misc_feature 1..22: note = chemically synthesized
  source 1..22: mol_type = other DNA
tgaaagctgctctgccatttgg

SEQ ID NO: 56110 - DNA, 22 bp, synthetic construct
  misc_feature 1..22: note = chemically synthesized
  source 1..22: mol_type = other DNA
ctctgccatttgggccacatga

SEQ ID NO: 56111 - DNA, 22 bp, synthetic construct
  misc_feature 1..22: note = chemically synthesized
  source 1..22: mol_type = other DNA
tgccatttgggccacatgaccc

SEQ ID NO: 56112 - DNA, 22 bp, synthetic construct
  misc_feature 1..22: note = chemically synthesized
  source 1..22: mol_type = other DNA
ccatttgggccacatgaccccg

SEQ ID NO: 56113 - DNA, 22 bp, synthetic construct
  misc_feature 1..22: note = chemically synthesized
  source 1..22: mol_type = other DNA
gggccacatgaccccgcagatc

SEQ ID NO: 56114 - DNA, 22 bp, synthetic construct
  misc_feature 1..22: note = chemically synthesized
  source 1..22: mol_type = other DNA
ggccacatgaccccgcagatcc

SEQ ID NO: 56115 - DNA, 22 bp, synthetic construct
  misc_feature 1..22: note = chemically synthesized
  source 1..22: mol_type = other DNA
gaggtgtcagtggcagataggg

SEQ ID NO: 56116 - DNA, 22 bp, synthetic construct
  misc_feature 1..22: note = chemically synthesized
  source 1..22: mol_type = other DNA
aggtgtcagtggcagataggga

SEQ ID NO: 56117 - DNA, 22 bp, synthetic construct
  misc_feature 1..22: note = chemically synthesized
  source 1..22: mol_type = other DNA
tttggagcctttggcaggcccc

SEQ ID NO: 56118 - DNA, 22 bp, synthetic construct
  misc_feature 1..22: note = chemically synthesized
  source 1..22: mol_type = other DNA
ggagcctttggcaggcccccat

SEQ ID NO: 56119 - DNA, 22 bp, synthetic construct
  misc_feature 1..22: note = chemically synthesized
  source 1..22: mol_type = other DNA
gagcctttggcaggcccccata

SEQ ID NO: 56120 - DNA, 22 bp, synthetic construct
  misc_feature 1..22: note = chemically synthesized
  source 1..22: mol_type = other DNA
tggcaggcccccataggtgaat

SEQ ID NO: 56121 - DNA, 22 bp, synthetic construct
  misc_feature 1..22: note = chemically synthesized
  source 1..22: mol_type = other DNA
ggcaggcccccataggtgaatc

SEQ ID NO: 56122 - DNA, 22 bp, synthetic construct
  misc_feature 1..22: note = chemically synthesized
  source 1..22: mol_type = other DNA
gcaggcccccataggtgaatca

SEQ ID NO: 56123 - DNA, 22 bp, synthetic construct
  misc_feature 1..22: note = chemically synthesized
  source 1..22: mol_type = other DNA
taggattttggagcaaggccct

SEQ ID NO: 56124 - DNA, 22 bp, synthetic construct
  misc_feature 1..22: note = chemically synthesized
  source 1..22: mol_type = other DNA
ggattttggagcaaggccctgc

SEQ ID NO: 56125 - DNA, 22 bp, synthetic construct
  misc_feature 1..22: note = chemically synthesized
  source 1..22: mol_type = other DNA
tggagcaaggccctgccacttc

SEQ ID NO: 56126 - DNA, 22 bp, synthetic construct
  misc_feature 1..22: note = chemically synthesized
  source 1..22: mol_type = other DNA
ggagcaaggccctgccacttct

SEQ ID NO: 56127 - DNA, 22 bp, synthetic construct
  misc_feature 1..22: note = chemically synthesized
  source 1..22: mol_type = other DNA
gagcaaggccctgccacttctg

SEQ ID NO: 56128 - DNA, 22 bp, synthetic construct
  misc_feature 1..22: note = chemically synthesized
  source 1..22: mol_type = other DNA
ccacttctgcagataactactc

SEQ ID NO: 56129 - DNA, 22 bp, synthetic construct
  misc_feature 1..22: note = chemically synthesized
  source 1..22: mol_type = other DNA
ctgcagataactactctccttt

SEQ ID NO: 56130 - DNA, 22 bp, synthetic construct
  misc_feature 1..22: note = chemically synthesized
  source 1..22: mol_type = other DNA
tgcagataactactctcctttt

SEQ ID NO: 56131 - DNA, 22 bp, synthetic construct
  misc_feature 1..22: note = chemically synthesized
  source 1..22: mol_type = other DNA
cagataactactctccttttga

SEQ ID NO: 56132 - DNA, 22 bp, synthetic construct
  misc_feature 1..22: note = chemically synthesized
  source 1..22: mol_type = other DNA
ctctccttttgagagacagcta

SEQ ID NO: 56133 - DNA, 22 bp, synthetic construct
  misc_feature 1..22: note = chemically synthesized
  source 1..22: mol_type = other DNA
tccttttgagagacagctattg

SEQ ID NO: 56134 - DNA, 22 bp, synthetic construct
  misc_feature 1..22: note = chemically synthesized
  source 1..22: mol_type = other DNA
cttttgagagacagctattggt

SEQ ID NO: 56135 - DNA, 22 bp, synthetic construct
  misc_feature 1..22: note = chemically synthesized
  source 1..22: mol_type = other DNA
ttgagagacagctattggtctg

SEQ ID NO: 56136 - DNA, 22 bp, synthetic construct
  misc_feature 1..22: note = chemically synthesized
  source 1..22: mol_type = other DNA
tgagagacagctattggtctgt

SEQ ID NO: 56137 - DNA, 22 bp, synthetic construct
  misc_feature 1..22: note = chemically synthesized
  source 1..22: mol_type = other DNA
gagagacagctattggtctgtt

SEQ ID NO: 56138 - DNA, 22 bp, synthetic construct
  misc_feature 1..22: note = chemically synthesized
  source 1..22: mol_type = other DNA
agagacagctattggtctgtta

SEQ ID NO: 56139 - DNA, 22 bp, synthetic construct
  misc_feature 1..22: note = chemically synthesized
  source 1..22: mol_type = other DNA
ttggtctgttattgggctttgg

SEQ ID NO: 56140 - DNA, 22 bp, synthetic construct
  misc_feature 1..22: note = chemically synthesized
  source 1..22: mol_type = other DNA
gtctgttattgggctttggtgg

SEQ ID NO: 56141 - DNA, 22 bp, synthetic construct
  misc_feature 1..22: note = chemically synthesized
  source 1..22: mol_type = other DNA
ttattgggctttggtggtaact

SEQ ID NO: 56142 - DNA, 22 bp, synthetic construct
  misc_feature 1..22: note = chemically synthesized
  source 1..22: mol_type = other DNA
ttgggctttggtggtaactgaa

SEQ ID NO: 56143 - DNA, 22 bp, synthetic construct
  misc_feature 1..22: note = chemically synthesized
  source 1..22: mol_type = other DNA
ggctttggtggtaactgaacgt

SEQ ID NO: 56144 - DNA, 22 bp, synthetic construct
  misc_feature 1..22: note = chemically synthesized
  source 1..22: mol_type = other DNA
tggtggtaactgaacgtttgac

SEQ ID NO: 56145 - DNA, 22 bp, synthetic construct
  misc_feature 1..22: note = chemically synthesized
  source 1..22: mol_type = other DNA
ggtggtaactgaacgtttgact

SEQ ID NO: 56146 - DNA, 22 bp, synthetic construct
  misc_feature 1..22: note = chemically synthesized
  source 1..22: mol_type = other DNA
gtggtaactgaacgtttgactg

SEQ ID NO: 56147 - DNA, 22 bp, synthetic construct
  misc_feature 1..22: note = chemically synthesized
  source 1..22: mol_type = other DNA
aacgtttgactgtgggtcataa

SEQ ID NO: 56148 - DNA, 22 bp, synthetic construct
  misc_feature 1..22: note = chemically synthesized
  source 1..22: mol_type = other DNA
gactgtgggtcataaagtcacc

SEQ ID NO: 56149 - DNA, 22 bp, synthetic construct
  misc_feature 1..22: note = chemically synthesized
  source 1..22: mol_type = other DNA
actgtgggtcataaagtcacca

SEQ ID NO: 56150 - DNA, 22 bp, synthetic construct
  misc_feature 1..22: note = chemically synthesized
  source 1..22: mol_type = other DNA
tgggtcataaagtcaccatgct

SEQ ID NO: 56151 - DNA, 22 bp, synthetic construct
  misc_feature 1..22: note = chemically synthesized
  source 1..22: mol_type = other DNA
cctgaacctgcctatcatgaac

SEQ ID NO: 56152 - DNA, 22 bp, synthetic construct
  misc_feature 1..22: note = chemically synthesized
  source 1..22: mol_type = other DNA
aacctgcctatcatgaactggt

SEQ ID NO: 56153 - DNA, 22 bp, synthetic construct
  misc_feature 1..22: note = chemically synthesized
  source 1..22: mol_type = other DNA
cctatcatgaactggttgcttt

SEQ ID NO: 56154 - DNA, 22 bp, synthetic construct
  misc_feature 1..22: note = chemically synthesized
  source 1..22: mol_type = other DNA
tcatgaactggttgctttctga

SEQ ID NO: 56155 - DNA, 22 bp, synthetic construct
  misc_feature 1..22: note = chemically synthesized
  source 1..22: mol_type = other DNA
gttgctttctgacccatctagc

SEQ ID NO: 56156 - DNA, 22 bp, synthetic construct
  misc_feature 1..22: note = chemically synthesized
  source 1..22: mol_type = other DNA
ctttctgacccatctagccatg

SEQ ID NO: 56157 - DNA, 22 bp, synthetic construct
  misc_feature 1..22: note = chemically synthesized
  source 1..22: mol_type = other DNA
tctgacccatctagccatgaag

SEQ ID NO: 56158 - DNA, 22 bp, synthetic construct
  misc_feature 1..22: note = chemically synthesized
  source 1..22: mol_type = other DNA
ctgacccatctagccatgaagt

SEQ ID NO: 56159 - DNA, 22 bp, synthetic construct
  misc_feature 1..22: note = chemically synthesized
  source 1..22: mol_type = other DNA
tgacccatctagccatgaagtg

SEQ ID NO: 56160 - DNA, 22 bp, synthetic construct
  misc_feature 1..22: note = chemically synthesized
  source 1..22: mol_type = other DNA
acccatctagccatgaagtggg

SEQ ID NO: 56161 - DNA, 22 bp, synthetic construct
  misc_feature 1..22: note = chemically synthesized
  source 1..22: mol_type = other DNA
gccatgaagtgggtcagcacag

SEQ ID NO: 56162 - DNA, 22 bp, synthetic construct
  misc_feature 1..22: note = chemically synthesized
  source 1..22: mol_type = other DNA
catcatcaaattgaagtggtgt

SEQ ID NO: 56163 - DNA, 22 bp, synthetic construct
  misc_feature 1..22: note = chemically synthesized
  source 1..22: mol_type = other DNA
atcatcaaattgaagtggtgtg

SEQ ID NO: 56164 - DNA, 22 bp, synthetic construct
  misc_feature 1..22: note = chemically synthesized
  source 1..22: mol_type = other DNA
aagtggtgtgtatgtgatcggg

SEQ ID NO: 56165 - DNA, 22 bp, synthetic construct
  misc_feature 1..22: note = chemically synthesized
  source 1..22: mol_type = other DNA
gagcaggtcctgaaggcacaag

SEQ ID NO: 56166 - DNA, 22 bp, synthetic construct
  misc_feature 1..22: note = chemically synthesized
  source 1..22: mol_type = other DNA
agcaggtcctgaaggcacaagt

SEQ ID NO: 56167 - DNA, 22 bp, synthetic construct
  misc_feature 1..22: note = chemically synthesized
  source 1..22: mol_type = other DNA
aaggcacaagtaagttacataa

SEQ ID NO: 56168 - DNA, 22 bp, synthetic construct
  misc_feature 1..22: note = chemically synthesized
  source 1..22: mol_type = other DNA
cataaggaagtggctcaaatgc

SEQ ID NO: 56169 - DNA, 22 bp, synthetic construct
  misc_feature 1..22: note = chemically synthesized
  source 1..22: mol_type = other DNA
aaatgcccatgttctccactca

SEQ ID NO: 56170 - DNA, 22 bp, synthetic construct
  misc_feature 1..22: note = chemically synthesized
  source 1..22: mol_type = other DNA
tccactcatgccaccctgcctt

SEQ ID NO: 56171 - DNA, 22 bp, synthetic construct
  misc_feature 1..22: note = chemically synthesized
  source 1..22: mol_type = other DNA
cactcatgccaccctgccttcc

SEQ ID NO: 56172 - DNA, 22 bp, synthetic construct
  misc_feature 1..22: note = chemically synthesized
  source 1..22: mol_type = other DNA
atgccaccctgccttccctccc

SEQ ID NO: 56173 - DNA, 22 bp, synthetic construct
  misc_feature 1..22: note = chemically synthesized
  source 1..22: mol_type = other DNA
ccttccctcccccagcctgcac

SEQ ID NO: 56174 - DNA, 22 bp, synthetic construct
  misc_feature 1..22: note = chemically synthesized
  source 1..22: mol_type = other DNA
ccctcccccagcctgcaccaat

SEQ ID NO: 56175 - DNA, 22 bp, synthetic construct
  misc_feature 1..22: note = chemically synthesized
  source 1..22: mol_type = other DNA
cctcccccagcctgcaccaatg

SEQ ID NO: 56176 - DNA, 22 bp, synthetic construct
  misc_feature 1..22: note = chemically synthesized
  source 1..22: mol_type = other DNA
ccccagcctgcaccaatggcct

SEQ ID NO: 56177 - DNA, 22 bp, synthetic construct
  misc_feature 1..22: note = chemically synthesized
  source 1..22: mol_type = other DNA
caccaatggcctcatggggagt

SEQ ID NO: 56178 - DNA, 22 bp, synthetic construct
  misc_feature 1..22: note = chemically synthesized
  source 1..22: mol_type = other DNA
atggggagttccctatgatcag

SEQ ID NO: 56179 - DNA, 22 bp, synthetic construct
  misc_feature 1..22: note = chemically synthesized
  source 1..22: mol_type = other DNA
cctatgatcagttgacagagga

SEQ ID NO: 56180 - DNA, 22 bp, synthetic construct
  misc_feature 1..22: note = chemically synthesized
  source 1..22: mol_type = other DNA
tgatcagttgacagaggaaggg

SEQ ID NO: 56181 - DNA, 22 bp, synthetic construct
  misc_feature 1..22: note = chemically synthesized
  source 1..22: mol_type = other DNA
acagaggaagggaagactaagg

SEQ ID NO: 56182 - DNA, 22 bp, synthetic construct
  misc_feature 1..22: note = chemically synthesized
  source 1..22: mol_type = other DNA
aggactggttcatagatggttc

SEQ ID NO: 56183 - DNA, 22 bp, synthetic construct
  misc_feature 1..22: note = chemically synthesized
  source 1..22: mol_type = other DNA
gttcatagatggttctgcacga

SEQ ID NO: 56184 - DNA, 22 bp, synthetic construct
  misc_feature 1..22: note = chemically synthesized
  source 1..22: mol_type = other DNA
atagatggttctgcacgatatg

SEQ ID NO: 56185 - DNA, 22 bp, synthetic construct
  misc_feature 1..22: note = chemically synthesized
  source 1..22: mol_type = other DNA
tgcacgatatgcaggcaccacc

SEQ ID NO: 56186 - DNA, 22 bp, synthetic construct
  misc_feature 1..22: note = chemically synthesized
  source 1..22: mol_type = other DNA
cacgatatgcaggcaccacccg

SEQ ID NO: 56187 - DNA, 22 bp, synthetic construct
  misc_feature 1..22: note = chemically synthesized
  source 1..22: mol_type = other DNA
cagcactatatccactttctaa

SEQ ID NO: 56188 - DNA, 22 bp, synthetic construct
  misc_feature 1..22: note = chemically synthesized
  source 1..22: mol_type = other DNA
tatccactttctaaatgcatgt

SEQ ID NO: 56189 - DNA, 22 bp, synthetic construct
  misc_feature 1..22: note = chemically synthesized
  source 1..22: mol_type = other DNA
tctaaatgcatgtgtacacttg

SEQ ID NO: 56190 - DNA, 22 bp, synthetic construct
  misc_feature 1..22: note = chemically synthesized
  source 1..22: mol_type = other DNA
ctaaatgcatgtgtacacttgt

SEQ ID NO: 56191 - DNA, 22 bp, synthetic construct
  misc_feature 1..22: note = chemically synthesized
  source 1..22: mol_type = other DNA
taaatgcatgtgtacacttgtg

SEQ ID NO: 56192 - DNA, 22 bp, synthetic construct
  misc_feature 1..22: note = chemically synthesized
  source 1..22: mol_type = other DNA
aatgcatgtgtacacttgtgct

SEQ ID NO: 56193 - DNA, 22 bp, synthetic construct
  misc_feature 1..22: note = chemically synthesized
  source 1..22: mol_type = other DNA
gtgctaagaaaatatctttatt

SEQ ID NO: 56194 - DNA, 22 bp, synthetic construct
  misc_feature 1..22: note = chemically synthesized
  source 1..22: mol_type = other DNA
tgctaagaaaatatctttattt

SEQ ID NO: 56195 - DNA, 22 bp, synthetic construct
  misc_feature 1..22: note = chemically synthesized
  source 1..22: mol_type = other DNA
agaaaatatctttattttattt

SEQ ID NO: 56196 - DNA, 22 bp, synthetic construct
  misc_feature 1..22: note = chemically synthesized
  source 1..22: mol_type = other DNA
tattttatttcctttatttttc

SEQ ID NO: 56197 - DNA, 22 bp, synthetic construct
  misc_feature 1..22: note = chemically synthesized
  source 1..22: mol_type = other DNA
attttatttcctttatttttcc

SEQ ID NO: 56198 - DNA, 22 bp, synthetic construct
  misc_feature 1..22: note = chemically synthesized
  source 1..22: mol_type = other DNA
ttttatttcctttatttttcct

SEQ ID NO: 56199 - DNA, 22 bp, synthetic construct
  misc_feature 1..22: note = chemically synthesized
  source 1..22: mol_type = other DNA
tatttcctttatttttccttta

SEQ ID NO: 56200 - DNA, 22 bp, synthetic construct
  misc_feature 1..22: note = chemically synthesized
  source 1..22: mol_type = other DNA
atttcctttatttttcctttat

SEQ ID NO: 56201 - DNA, 22 bp, synthetic construct
  misc_feature 1..22: note = chemically synthesized
  source 1..22: mol_type = other DNA
tttcctttatttttcctttatc

SEQ ID NO: 56202 - DNA, 22 bp, synthetic construct
  misc_feature 1..22: note = chemically synthesized
  source 1..22: mol_type = other DNA
cctttatttttcctttatcatg

SEQ ID NO: 56203 - DNA, 22 bp, synthetic construct
  misc_feature 1..22: note = chemically synthesized
  source 1..22: mol_type = other DNA
ctttatttttcctttatcatgt

SEQ ID NO: 56204 - DNA, 22 bp, synthetic construct
  misc_feature 1..22: note = chemically synthesized
  source 1..22: mol_type = other DNA
tatttttcctttatcatgtgac

SEQ ID NO: 56205 - DNA, 22 bp, synthetic construct
  misc_feature 1..22: note = chemically synthesized
  source 1..22: mol_type = other DNA
atttttcctttatcatgtgacc

SEQ ID NO: 56206 - DNA, 22 bp, synthetic construct
  misc_feature 1..22: note = chemically synthesized
  source 1..22: mol_type = other DNA
tttttcctttatcatgtgacct

SEQ ID NO: 56207 - DNA, 22 bp, synthetic construct
  misc_feature 1..22: note = chemically synthesized
  source 1..22: mol_type = other DNA
ttcctttatcatgtgaccttag

SEQ ID NO: 56208 - DNA, 22 bp, synthetic construct
  misc_feature 1..22: note = chemically synthesized
  source 1..22: mol_type = other DNA
tcctttatcatgtgaccttaga

SEQ ID NO: 56209 - DNA, 22 bp, synthetic construct
  misc_feature 1..22: note = chemically synthesized
  source 1..22: mol_type = other DNA
cctttatcatgtgaccttagat

SEQ ID NO: 56210 - DNA, 22 bp, synthetic construct
  misc_feature 1..22: note = chemically synthesized
  source 1..22: mol_type = other DNA
ctttatcatgtgaccttagatt

SEQ ID NO: 56211 - DNA, 22 bp, synthetic construct
  misc_feature 1..22: note = chemically synthesized
  source 1..22: mol_type = other DNA
tatcatgtgaccttagatttat

SEQ ID NO: 56212 - DNA, 22 bp, synthetic construct
  misc_feature 1..22: note = chemically synthesized
  source 1..22: mol_type = other DNA
atcatgtgaccttagatttatg

SEQ ID NO: 56213 - DNA, 22 bp, synthetic construct
  misc_feature 1..22: note = chemically synthesized
  source 1..22: mol_type = other DNA
tcatgtgaccttagatttatgg

SEQ ID NO: 56214 - DNA, 22 bp, synthetic construct
  misc_feature 1..22: note = chemically synthesized
  source 1..22: mol_type = other DNA
agatttatggacttcacatcag

SEQ ID NO: 56215 - DNA, 22 bp, synthetic construct
  misc_feature 1..22: note = chemically synthesized
  source 1..22: mol_type = other DNA
gatttatggacttcacatcagc

SEQ ID NO: 56216 - DNA, 22 bp, synthetic construct
  misc_feature 1..22: note = chemically synthesized
  source 1..22: mol_type = other DNA
atggacttcacatcagcattta

SEQ ID NO: 56217 - DNA, 22 bp, synthetic construct
  misc_feature 1..22: note = chemically synthesized
  source 1..22: mol_type = other DNA
tggacttcacatcagcatttaa

SEQ ID NO: 56218 - DNA, 22 bp, synthetic construct
  misc_feature 1..22: note = chemically synthesized
  source 1..22: mol_type = other DNA
cacatcagcatttaagcattta

SEQ ID NO: 56219 - DNA, 22 bp, synthetic construct
  misc_feature 1..22: note = chemically synthesized
  source 1..22: mol_type = other DNA
acatcagcatttaagcatttaa

SEQ ID NO: 56220 - DNA, 22 bp, synthetic construct
  misc_feature 1..22: note = chemically synthesized
  source 1..22: mol_type = other DNA
aagcatttaagtgttgttcata

SEQ ID NO: 56221 - DNA, 22 bp, synthetic construct
  misc_feature 1..22: note = chemically synthesized
  source 1..22: mol_type = other DNA
agcatttaagtgttgttcatat

SEQ ID NO: 56222 - DNA, 22 bp, synthetic construct
  misc_feature 1..22: note = chemically synthesized
  source 1..22: mol_type = other DNA
aagtgttgttcatatcagcatt

SEQ ID NO: 56223 - DNA, 22 bp, synthetic construct
  misc_feature 1..22: note = chemically synthesized
  source 1..22: mol_type = other DNA
agtgttgttcatatcagcattt

SEQ ID NO: 56224 - DNA, 22 bp, synthetic construct
  misc_feature 1..22: note = chemically synthesized
  source 1..22: mol_type = other DNA
ttcatatcagcatttaaatatt

SEQ ID NO: 56225 - DNA, 22 bp, synthetic construct
  misc_feature 1..22: note = chemically synthesized
  source 1..22: mol_type = other DNA
atatcagcatttaaatattgtt

SEQ ID NO: 56226 - DNA, 22 bp, synthetic construct
  misc_feature 1..22: note = chemically synthesized
  source 1..22: mol_type = other DNA
aaatattgttaaccttatgtaa

SEQ ID NO: 56227 - DNA, 22 bp, synthetic construct
  misc_feature 1..22: note = chemically synthesized
  source 1..22: mol_type = other DNA
aatattgttaaccttatgtaat

SEQ ID NO: 56228 - DNA, 22 bp, synthetic construct
  misc_feature 1..22: note = chemically synthesized
  source 1..22: mol_type = other DNA
ttaaccttatgtaataactttt

SEQ ID NO: 56229 - DNA, 22 bp, synthetic construct
  misc_feature 1..22: note = chemically synthesized
  source 1..22: mol_type = other DNA
accttatgtaataacttttggt

SEQ ID NO: 56230 - DNA, 22 bp, synthetic construct
  misc_feature 1..22: note = chemically synthesized
  source 1..22: mol_type = other DNA
atgtaataacttttggtttggg

SEQ ID NO: 56231 - DNA, 22 bp, synthetic construct
  misc_feature 1..22: note = chemically synthesized
  source 1..22: mol_type = other DNA
tgtaataacttttggtttgggg

SEQ ID NO: 56232 - DNA, 22 bp, synthetic construct
  misc_feature 1..22: note = chemically synthesized
  source 1..22: mol_type = other DNA
ttggtttggggattggtgcgtt

SEQ ID NO: 56233 - DNA, 22 bp, synthetic construct
  misc_feature 1..22: note = chemically synthesized
  source 1..22: mol_type = other DNA
tggtttggggattggtgcgttt

SEQ ID NO: 56234 - DNA, 22 bp, synthetic construct
  misc_feature 1..22: note = chemically synthesized
  source 1..22: mol_type = other DNA
ggtttggggattggtgcgtttc

SEQ ID NO: 56235 - DNA, 22 bp, synthetic construct
  misc_feature 1..22: note = chemically synthesized
  source 1..22: mol_type = other DNA
gtttggggattggtgcgtttct

SEQ ID NO: 56236 - DNA, 22 bp, synthetic construct
  misc_feature 1..22: note = chemically synthesized
  source 1..22: mol_type = other DNA
ggggattggtgcgtttctggtt

SEQ ID NO: 56237 - DNA, 22 bp, synthetic construct
  misc_feature 1..22: note = chemically synthesized
  source 1..22: mol_type = other DNA
gggattggtgcgtttctggttg

SEQ ID NO: 56238 - DNA, 22 bp, synthetic construct
  misc_feature 1..22: note = chemically synthesized
  source 1..22: mol_type = other DNA
gtgcgtttctggttgtatgagg

SEQ ID NO: 56239 - DNA, 22 bp, synthetic construct
  misc_feature 1..22: note = chemically synthesized
  source 1..22: mol_type = other DNA
ctggttgtatgaggatagttgt

SEQ ID NO: 56240 - DNA, 22 bp, synthetic construct
  misc_feature 1..22: note = chemically synthesized
  source 1..22: mol_type = other DNA
tggttgtatgaggatagttgta

SEQ ID NO: 56241 - DNA, 22 bp, synthetic construct
  misc_feature 1..22: note = chemically synthesized
  source 1..22: mol_type = other DNA
gttgtatgaggatagttgtatt

SEQ ID NO: 56242 - DNA, 22 bp, synthetic construct
  misc_feature 1..22: note = chemically synthesized
  source 1..22: mol_type = other DNA
tatgaggatagttgtattatat

SEQ ID NO: 56243 - DNA, 22 bp, synthetic construct
  misc_feature 1..22: note = chemically synthesized
  source 1..22: mol_type = other DNA
tattatattaggcataattatg

SEQ ID NO: 56244 - DNA, 22 bp, synthetic construct
  misc_feature 1..22: note = chemically synthesized
  source 1..22: mol_type = other DNA
tattaggcataattatgacctt

SEQ ID NO: 56245 - DNA, 22 bp, synthetic construct
  misc_feature 1..22: note = chemically synthesized
  source 1..22: mol_type = other DNA
ggcataattatgaccttattat

SEQ ID NO: 56246 - DNA, 22 bp, synthetic construct
  misc_feature 1..22: note = chemically synthesized
  source 1..22: mol_type = other DNA
tgaccttattattgtctttatt

SEQ ID NO: 56247 - DNA, 22 bp, synthetic construct
  misc_feature 1..22: note = chemically synthesized
  source 1..22: mol_type = other DNA
attattgtctttatttgaagat

SEQ ID NO: 56248 - DNA, 22 bp, synthetic construct
  misc_feature 1..22: note = chemically synthesized
  source 1..22: mol_type = other DNA
ttattgtctttatttgaagatt

SEQ ID NO: 56249 - DNA, 22 bp, synthetic construct
  misc_feature 1..22: note = chemically synthesized
  source 1..22: mol_type = other DNA
ttgtctttatttgaagattatg

SEQ ID NO: 56250 - DNA, 22 bp, synthetic construct
  misc_feature 1..22: note = chemically synthesized
  source 1..22: mol_type = other DNA
tctttatttgaagattatgtat

SEQ ID NO: 56251 - DNA, 22 bp, synthetic construct
  misc_feature 1..22: note = chemically synthesized
  source 1..22: mol_type = other DNA
tatttgaagattatgtatgatt

SEQ ID NO: 56252 - DNA, 22 bp, synthetic construct
  misc_feature 1..22: note = chemically synthesized
  source 1..22: mol_type = other DNA
atttgaagattatgtatgattt

SEQ ID NO: 56253 - DNA, 22 bp, synthetic construct
  misc_feature 1..22: note = chemically synthesized
  source 1..22: mol_type = other DNA
tttgaagattatgtatgatttc

SEQ ID NO: 56254 - DNA, 22 bp, synthetic construct
  misc_feature 1..22: note = chemically synthesized
  source 1..22: mol_type = other DNA
gaagattatgtatgatttcagg

SEQ ID NO: 56255 - DNA, 22 bp, synthetic construct
  misc_feature 1..22: note = chemically synthesized
  source 1..22: mol_type = other DNA
aagattatgtatgatttcagga

SEQ ID NO: 56256 - DNA, 22 bp, synthetic construct
  misc_feature 1..22: note = chemically synthesized
  source 1..22: mol_type = other DNA
tgtatgatttcaggatgtgtgt

SEQ ID NO: 56257 - DNA, 22 bp, synthetic construct
  misc_feature 1..22: note = chemically synthesized
  source 1..22: mol_type = other DNA
caggatgtgtgtatgggttcaa

SEQ ID NO: 56258 - DNA, 22 bp, synthetic construct
  misc_feature 1..22: note = chemically synthesized
  source 1..22: mol_type = other DNA
aggatgtgtgtatgggttcaag

SEQ ID NO: 56259 - DNA, 22 bp, synthetic construct
  misc_feature 1..22: note = chemically synthesized
  source 1..22: mol_type = other DNA
aagttgacaaggagttggactt

SEQ ID NO: 56260 - DNA, 22 bp, synthetic construct
  misc_feature 1..22: note = chemically synthesized
  source 1..22: mol_type = other DNA
acaaggagttggacttgtgatg

SEQ ID NO: 56261 - DNA, 22 bp, synthetic construct
  misc_feature 1..22: note = chemically synthesized
  source 1..22: mol_type = other DNA
gacttgtgatggttaatactgt

SEQ ID NO: 56262 - DNA, 22 bp, synthetic construct
  misc_feature 1..22: note = chemically synthesized
  source 1..22: mol_type = other DNA
gtgatggttaatactgtcaact

SEQ ID NO: 56263 - DNA, 22 bp, synthetic construct
  misc_feature 1..22: note = chemically synthesized
  source 1..22: mol_type = other DNA
tgatggttaatactgtcaactt

SEQ ID NO: 56264 - DNA, 22 bp, synthetic construct
  misc_feature 1..22: note = chemically synthesized
  source 1..22: mol_type = other DNA
atactgtcaacttgattggatt

SEQ ID NO: 56265 - DNA, 22 bp, synthetic construct
  misc_feature 1..22: note = chemically synthesized
  source 1..22: mol_type = other DNA
tcaacttgattggattgaaaga

SEQ ID NO: 56266 - DNA, 22 bp, synthetic construct
  misc_feature 1..22: note = chemically synthesized
  source 1..22: mol_type = other DNA
gattggattgaaagatgcaaag

SEQ ID NO: 56267 - DNA, 22 bp, synthetic construct
  misc_feature 1..22: note = chemically synthesized
  source 1..22: mol_type = other DNA
attggattgaaagatgcaaagt

SEQ ID NO: 56268 - DNA, 22 bp, synthetic construct
  misc_feature 1..22: note = chemically synthesized
  source 1..22: mol_type = other DNA
gattgaaagatgcaaagtatta

SEQ ID NO: 56269 - DNA, 22 bp, synthetic construct
  misc_feature 1..22: note = chemically synthesized
  source 1..22: mol_type = other DNA
aaagatgcaaagtattaatctc

SEQ ID NO: 56270 - DNA, 22 bp, synthetic construct
  misc_feature 1..22: note = chemically synthesized
  source 1..22: mol_type = other DNA
atctcggttatgtctgtgaggg

SEQ ID NO: 56271 - DNA, 22 bp, synthetic construct
  misc_feature 1..22: note = chemically synthesized
  source 1..22: mol_type = other DNA
ggttatgtctgtgagggtgtgg

SEQ ID NO: 56272 - DNA, 22 bp, synthetic construct
  misc_feature 1..22: note = chemically synthesized
  source 1..22: mol_type = other DNA
tgtctgtgagggtgtggcaaaa

SEQ ID NO: 56273 - DNA, 22 bp, synthetic construct
  misc_feature 1..22: note = chemically synthesized
  source 1..22: mol_type = other DNA
tgagggtgtggcaaaaggagat

SEQ ID NO: 56274 - DNA, 22 bp, synthetic construct
  misc_feature 1..22: note = chemically synthesized
  source 1..22: mol_type = other DNA
acatttgagtcagtgggctggg

SEQ ID NO: 56275 - DNA, 20 bp, synthetic construct
  misc_feature 1..20: note = chemically synthesized
  source 1..20: mol_type = other DNA
taacgaccccggtaggtgag

SEQ ID NO: 56276 - DNA, 20 bp, synthetic construct
  misc_feature 1..20: note = chemically synthesized
  source 1..20: mol_type = other DNA
accccggtaggtgagaggcc

SEQ ID NO: 56277 - DNA, 20 bp, synthetic construct
  misc_feature 1..20: note = chemically synthesized
  source 1..20: mol_type = other DNA
ccccggtaggtgagaggcca

SEQ ID NO: 56278 - DNA, 20 bp, synthetic construct
  misc_feature 1..20: note = chemically synthesized
  source 1..20: mol_type = other DNA
ggtgagaggccaaggtccca

SEQ ID NO: 56279 - DNA, 20 bp, synthetic construct
  misc_feature 1..20: note = chemically synthesized
  source 1..20: mol_type = other DNA
gtgagaggccaaggtcccaa

SEQ ID NO: 56280 - DNA, 20 bp, synthetic construct
  misc_feature 1..20: note = chemically synthesized
  source 1..20: mol_type = other DNA
tgagaggccaaggtcccaaa

SEQ ID NO: 56281 - DNA, 20 bp, synthetic construct
  misc_feature 1..20: note = chemically synthesized
  source 1..20: mol_type = other DNA
gagaggccaaggtcccaaag

SEQ ID NO: 56282 - DNA, 20 bp, synthetic construct
  misc_feature 1..20: note = chemically synthesized
  source 1..20: mol_type = other DNA
gaggccaaggtcccaaaggg

SEQ ID NO: 56283 - DNA, 20 bp, synthetic construct
  misc_feature 1..20: note = chemically synthesized
  source 1..20: mol_type = other DNA
gccaaggtcccaaaggggag

SEQ ID NO: 56284 - DNA, 20 bp, synthetic construct
  misc_feature 1..20: note = chemically synthesized
  source 1..20: mol_type = other DNA
aaggtcccaaaggggagcag

SEQ ID NO: 56285 - DNA, 20 bp, synthetic construct
  misc_feature 1..20: note = chemically synthesized
  source 1..20: mol_type = other DNA
aggtcccaaaggggagcagc

SEQ ID NO: 56286 - DNA, 20 bp, synthetic construct
  misc_feature 1..20: note = chemically synthesized
  source 1..20: mol_type = other DNA
ggtcccaaaggggagcagca

SEQ ID NO: 56287 - DNA, 20 bp, synthetic construct
  misc_feature 1..20: note = chemically synthesized
  source 1..20: mol_type = other DNA
ccaaaggggagcagcaggga

SEQ ID NO: 56288 - DNA, 20 bp, synthetic construct
  misc_feature 1..20: note = chemically synthesized
  source 1..20: mol_type = other DNA
aggggagcagcagggaaagt

SEQ ID NO: 56289 - DNA, 20 bp, synthetic construct
  misc_feature 1..20: note = chemically synthesized
  source 1..20: mol_type = other DNA
gctcccatctattcttgctc

SEQ ID NO: 56290 - DNA, 20 bp, synthetic construct
  misc_feature 1..20: note = chemically synthesized
  source 1..20: mol_type = other DNA
ctcccatctattcttgctcc

SEQ ID NO: 56291 - DNA, 20 bp, synthetic construct
  misc_feature 1..20: note = chemically synthesized
  source 1..20: mol_type = other DNA
tcccatctattcttgctcca

SEQ ID NO: 56292 - DNA, 20 bp, synthetic construct
  misc_feature 1..20: note = chemically synthesized
  source 1..20: mol_type = other DNA
cccatctattcttgctccag

SEQ ID NO: 56293 - DNA, 20 bp, synthetic construct
  misc_feature 1..20: note = chemically synthesized
  source 1..20: mol_type = other DNA
catctattcttgctccaggg

SEQ ID NO: 56294 - DNA, 20 bp, synthetic construct
  misc_feature 1..20: note = chemically synthesized
  source 1..20: mol_type = other DNA
atctattcttgctccagggg

SEQ ID NO: 56295 - DNA, 20 bp, synthetic construct
  misc_feature 1..20: note = chemically synthesized
  source 1..20: mol_type = other DNA
ctccaggggaggcctttgat

SEQ ID NO: 56296 - DNA, 20 bp, synthetic construct
  misc_feature 1..20: note = chemically synthesized
  source 1..20: mol_type = other DNA
tccaggggaggcctttgatg

SEQ ID NO: 56297 - DNA, 20 bp, synthetic construct
  misc_feature 1..20: note = chemically synthesized
  source 1..20: mol_type = other DNA
aggggaggcctttgatgagg

SEQ ID NO: 56298 - DNA, 20 bp, synthetic construct
  misc_feature 1..20: note = chemically synthesized
  source 1..20: mol_type = other DNA
tttgatgaggaagctgccaa

SEQ ID NO: 56299 - DNA, 20 bp, synthetic construct
  misc_feature 1..20: note = chemically synthesized
  source 1..20: mol_type = other DNA
tgcaaatacaattccaatta

SEQ ID NO: 56300 - DNA, 20 bp, synthetic construct
  misc_feature 1..20: note = chemically synthesized
  source 1..20: mol_type = other DNA
gcaaatacaattccaattac

SEQ ID NO: 56301 - DNA, 20 bp, synthetic construct
  misc_feature 1..20: note = chemically synthesized
  source 1..20: mol_type = other DNA
acaattccaattacaggcaa

SEQ ID NO: 56302 - DNA, 20 bp, synthetic construct
  misc_feature 1..20: note = chemically synthesized
  source 1..20: mol_type = other DNA
caattccaattacaggcaac

SEQ ID NO: 56303 - DNA, 20 bp, synthetic construct
  misc_feature 1..20: note = chemically synthesized
  source 1..20: mol_type = other DNA
ttccaattacaggcaacagg

SEQ ID NO: 56304 - DNA, 20 bp, synthetic construct
  misc_feature 1..20: note = chemically synthesized
  source 1..20: mol_type = other DNA
tccaattacaggcaacagga

SEQ ID NO: 56305 - DNA, 20 bp, synthetic construct
  misc_feature 1..20: note = chemically synthesized
  source 1..20: mol_type = other DNA
caattacaggcaacaggaag

SEQ ID NO: 56306 - DNA, 20 bp, synthetic construct
  misc_feature 1..20: note = chemically synthesized
  source 1..20: mol_type = other DNA
accacctctgccacctctgt

SEQ ID NO: 56307 - DNA, 20 bp, synthetic construct
  misc_feature 1..20: note = chemically synthesized
  source 1..20: mol_type = other DNA
cacctctgtcagcaaaccat

SEQ ID NO: 56308 - DNA, 20 bp, synthetic construct
  misc_feature 1..20: note = chemically synthesized
  source 1..20: mol_type = other DNA
gctcctactctgtgctgcga

SEQ ID NO: 56309 - DNA, 20 bp, synthetic construct
  misc_feature 1..20: note = chemically synthesized
  source 1..20: mol_type = other DNA
cctactctgtgctgcgatgg

SEQ ID NO: 56310 - DNA, 20 bp, synthetic construct
  misc_feature 1..20: note = chemically synthesized
  source 1..20: mol_type = other DNA
ctactctgtgctgcgatggc

SEQ ID NO: 56311 - DNA, 20 bp, synthetic construct
  misc_feature 1..20: note = chemically synthesized
  source 1..20: mol_type = other DNA
tgctgcgatggcgggctcga

SEQ ID NO: 56312 - DNA, 20 bp, synthetic construct
  misc_feature 1..20: note = chemically synthesized
  source 1..20: mol_type = other DNA
gctgcgatggcgggctcgat

SEQ ID NO: 56313 - DNA, 20 bp, synthetic construct
  misc_feature 1..20: note = chemically synthesized
  source 1..20: mol_type = other DNA
ctgcgatggcgggctcgatg

SEQ ID NO: 56314 - DNA, 20 bp, synthetic construct
  misc_feature 1..20: note = chemically synthesized
  source 1..20: mol_type = other DNA
ataactctgaccttacctca

SEQ ID NO: 56315 - DNA, 20 bp, synthetic construct
  misc_feature 1..20: note = chemically synthesized
  source 1..20: mol_type = other DNA
aactctgaccttacctcatg

SEQ ID NO: 56316 - DNA, 20 bp, synthetic construct
  misc_feature 1..20: note = chemically synthesized
  source 1..20: mol_type = other DNA
tggagtcactgtcaacccac

SEQ ID NO: 56317 - DNA, 20 bp, synthetic construct
  misc_feature 1..20: note = chemically synthesized
  source 1..20: mol_type = other DNA
gttgcactgtctttgtgcac

SEQ ID NO: 56318 - DNA, 20 bp, synthetic construct
  misc_feature 1..20: note = chemically synthesized
  source 1..20: mol_type = other DNA
gtctttgtgcactggctctc

SEQ ID NO: 56319 - DNA, 20 bp, synthetic construct
  misc_feature 1..20: note = chemically synthesized
  source 1..20: mol_type = other DNA
ctttgtgcactggctctctg

SEQ ID NO: 56320 - DNA, 20 bp, synthetic construct
  misc_feature 1..20: note = chemically synthesized
  source 1..20: mol_type = other DNA
gtgcactggctctctggagt

SEQ ID NO: 56321 - DNA, 20 bp, synthetic construct
  misc_feature 1..20: note = chemically synthesized
  source 1..20: mol_type = other DNA
tgcactggctctctggagtg

SEQ ID NO: 56322 - DNA, 20 bp, synthetic construct
  misc_feature 1..20: note = chemically synthesized
  source 1..20: mol_type = other DNA
gagtgaggtctttgcaaaca

SEQ ID NO: 56323 - DNA, 20 bp, synthetic construct
  misc_feature 1..20: note = chemically synthesized
  source 1..20: mol_type = other DNA
tgaggtctttgcaaacaaag

SEQ ID NO: 56324 - DNA, 20 bp, synthetic construct
  misc_feature 1..20: note = chemically synthesized
  source 1..20: mol_type = other DNA
gtctttgcaaacaaagtgga

SEQ ID NO: 56325 - DNA, 20 bp, synthetic construct
  misc_feature 1..20: note = chemically synthesized
  source 1..20: mol_type = other DNA
ctttgcaaacaaagtggaaa

SEQ ID NO: 56326 - DNA, 20 bp, synthetic construct
  misc_feature 1..20: note = chemically synthesized
  source 1..20: mol_type = other DNA
agtggaaagagcatcaactt

SEQ ID NO: 56327 - DNA, 20 bp, synthetic construct
  misc_feature 1..20: note = chemically synthesized
  source 1..20: mol_type = other DNA
agagcatcaactttggactc

SEQ ID NO: 56328 - DNA, 20 bp, synthetic construct
  misc_feature 1..20: note = chemically synthesized
  source 1..20: mol_type = other DNA
caactttggactccagcacc

SEQ ID NO: 56329 - DNA, 20 bp, synthetic construct
  misc_feature 1..20: note = chemically synthesized
  source 1..20: mol_type = other DNA
tggactccagcacctagatt

SEQ ID NO: 56330 - DNA, 20 bp, synthetic construct
  misc_feature 1..20: note = chemically synthesized
  source 1..20: mol_type = other DNA
gactccagcacctagattca

SEQ ID NO: 56331 - DNA, 20 bp, synthetic construct
  misc_feature 1..20: note = chemically synthesized
  source 1..20: mol_type = other DNA
tccagcacctagattcagag

SEQ ID NO: 56332 - DNA, 20 bp, synthetic construct
  misc_feature 1..20: note = chemically synthesized
  source 1..20: mol_type = other DNA
ccagcacctagattcagagc

SEQ ID NO: 56333 - DNA, 20 bp, synthetic construct
  misc_feature 1..20: note = chemically synthesized
  source 1..20: mol_type = other DNA
tcagagcaggccatttcact

SEQ ID NO: 56334 - DNA, 20 bp, synthetic construct
  misc_feature 1..20: note = chemically synthesized
  source 1..20: mol_type = other DNA
ggaatctgctgtgcatctgc

SEQ ID NO: 56335 - DNA, 20 bp, synthetic construct
  misc_feature 1..20: note = chemically synthesized
  source 1..20: mol_type = other DNA
gaatctgctgtgcatctgca

SEQ ID NO: 56336 - DNA, 20 bp, synthetic construct
  misc_feature 1..20: note = chemically synthesized
  source 1..20: mol_type = other DNA
aatctgctgtgcatctgcaa

SEQ ID NO: 56337 - DNA, 20 bp, synthetic construct
  misc_feature 1..20: note = chemically synthesized
  source 1..20: mol_type = other DNA
tctgctgtgcatctgcaagg

SEQ ID NO: 56338 - DNA, 20 bp, synthetic construct
  misc_feature 1..20: note = chemically synthesized
  source 1..20: mol_type = other DNA
ctgctgtgcatctgcaaggg

SEQ ID NO: 56339 - DNA, 20 bp, synthetic construct
  misc_feature 1..20: note = chemically synthesized
  source 1..20: mol_type = other DNA
aattcgcctttgtttcttcc

SEQ ID NO: 56340 - DNA, 20 bp, synthetic construct
  misc_feature 1..20: note = chemically synthesized
  source 1..20: mol_type = other DNA
ttgtttcttcccagtatcga

SEQ ID NO: 56341 - DNA, 20 bp, synthetic construct
  misc_feature 1..20: note = chemically synthesized
  source 1..20: mol_type = other DNA
cccagtatcgacagcccttc

SEQ ID NO: 56342 - DNA, 20 bp, synthetic construct
  misc_feature 1..20: note = chemically synthesized
  source 1..20: mol_type = other DNA
gtatcgacagcccttccaga

SEQ ID NO: 56343 - DNA, 20 bp, synthetic construct
  misc_feature 1..20: note = chemically synthesized
  source 1..20: mol_type = other DNA
atcgacagcccttccagaaa

SEQ ID NO: 56344 - DNA, 20 bp, synthetic construct
  misc_feature 1..20: note = chemically synthesized
  source 1..20: mol_type = other DNA
acagcccttccagaaagagc

SEQ ID NO: 56345 - DNA, 20 bp, synthetic construct
  misc_feature 1..20: note = chemically synthesized
  source 1..20: mol_type = other DNA
tcatgccacatgtacaatct

SEQ ID NO: 56346 - DNA, 20 bp, synthetic construct
  misc_feature 1..20: note = chemically synthesized
  source 1..20: mol_type = other DNA
catgccacatgtacaatctg

SEQ ID NO: 56347 - DNA, 20 bp, synthetic construct
  misc_feature 1..20: note = chemically synthesized
  source 1..20: mol_type = other DNA
ccacatgtacaatctgaggc

SEQ ID NO: 56348 - DNA, 20 bp, synthetic construct
  misc_feature 1..20: note = chemically synthesized
  source 1..20: mol_type = other DNA
cacatgtacaatctgaggcc

SEQ ID NO: 56349 - DNA, 20 bp, synthetic construct
  misc_feature 1..20: note = chemically synthesized
  source 1..20: mol_type = other DNA
catgtacaatctgaggccag

SEQ ID NO: 56350 - DNA, 20 bp, synthetic construct
  misc_feature 1..20: note = chemically synthesized
  source 1..20: mol_type = other DNA
ccccttttcatcctcctgcc

SEQ ID NO: 56351 - DNA, 20 bp, synthetic construct
  misc_feature 1..20: note = chemically synthesized
  source 1..20: mol_type = other DNA
tcctcctgcctggtacacaa

SEQ ID NO: 56352 - DNA, 20 bp, synthetic construct
  misc_feature 1..20: note = chemically synthesized
  source 1..20: mol_type = other DNA
cctcctgcctggtacacaat

SEQ ID NO: 56353 - DNA, 20 bp, synthetic construct
  misc_feature 1..20: note = chemically synthesized
  source 1..20: mol_type = other DNA
ggtacacaataggtgtttac

SEQ ID NO: 56354 - DNA, 20 bp, synthetic construct
  misc_feature 1..20: note = chemically synthesized
  source 1..20: mol_type = other DNA
gtgtttactggatgcttgtc

SEQ ID NO: 56355 - DNA, 20 bp, synthetic construct
  misc_feature 1..20: note = chemically synthesized
  source 1..20: mol_type = other DNA
tccagttgatttcttgaaca

SEQ ID NO: 56356 - DNA, 20 bp, synthetic construct
  misc_feature 1..20: note = chemically synthesized
  source 1..20: mol_type = other DNA
ttcttgaacatggtgtgtaa

SEQ ID NO: 56357 - DNA, 20 bp, synthetic construct
  misc_feature 1..20: note = chemically synthesized
  source 1..20: mol_type = other DNA
tcttgaacatggtgtgtaaa

SEQ ID NO: 56358 - DNA, 20 bp, synthetic construct
  misc_feature 1..20: note = chemically synthesized
  source 1..20: mol_type = other DNA
tctttgcaaattgaatcttc

SEQ ID NO: 56359 - DNA, 20 bp, synthetic construct
  misc_feature 1..20: note = chemically synthesized
  source 1..20: mol_type = other DNA
tgcaaattgaatcttctgga

SEQ ID NO: 56360 - DNA, 20 bp, synthetic construct
  misc_feature 1..20: note = chemically synthesized
  source 1..20: mol_type = other DNA
attgaatcttctggaaagct

SEQ ID NO: 56361 - DNA, 20 bp, synthetic construct
  misc_feature 1..20: note = chemically synthesized
  source 1..20: mol_type = other DNA
agctgagcttgtgcctacca

SEQ ID NO: 56362 - DNA, 20 bp, synthetic construct
  misc_feature 1..20: note = chemically synthesized
  source 1..20: mol_type = other DNA
acttaaaacctgaatctttg

SEQ ID NO: 56363 - DNA, 20 bp, synthetic construct
  misc_feature 1..20: note = chemically synthesized
  source 1..20: mol_type = other DNA
taaatcccttgaaatgcatg

SEQ ID NO: 56364 - DNA, 20 bp, synthetic construct
  misc_feature 1..20: note = chemically synthesized
  source 1..20: mol_type = other DNA
aaatcccttgaaatgcatgt

SEQ ID NO: 56365 - DNA, 20 bp, synthetic construct
  misc_feature 1..20: note = chemically synthesized
  source 1..20: mol_type = other DNA
cccttgaaatgcatgtaggc

SEQ ID NO: 56366 - DNA, 20 bp, synthetic construct
  misc_feature 1..20: note = chemically synthesized
  source 1..20: mol_type = other DNA
gcatgtaggctggacatcaa

SEQ ID NO: 56367 - DNA, 20 bp, synthetic construct
  misc_feature 1..20: note = chemically synthesized
  source 1..20: mol_type = other DNA
gtaggctggacatcaaaagc

SEQ ID NO: 56368 - DNA, 20 bp, synthetic construct
  misc_feature 1..20: note = chemically synthesized
  source 1..20: mol_type = other DNA
caaaagcaagcaatctcttc

SEQ ID NO: 56369 - DNA, 20 bp, synthetic construct
  misc_feature 1..20: note = chemically synthesized
  source 1..20: mol_type = other DNA
aaaagcaagcaatctcttca

SEQ ID NO: 56370 - DNA, 20 bp, synthetic construct
  misc_feature 1..20: note = chemically synthesized
  source 1..20: mol_type = other DNA
aagcaagcaatctcttcaag

SEQ ID NO: 56371 - DNA, 20 bp, synthetic construct
  misc_feature 1..20: note = chemically synthesized
  source 1..20: mol_type = other DNA
caagcaatctcttcaaggag

SEQ ID NO: 56372 - DNA, 20 bp, synthetic construct
  misc_feature 1..20: note = chemically synthesized
  source 1..20: mol_type = other DNA
caatctcttcaaggagcagc

SEQ ID NO: 56373 - DNA, 20 bp, synthetic construct
  misc_feature 1..20: note = chemically synthesized
  source 1..20: mol_type = other DNA
ctcttcaaggagcagctagt

SEQ ID NO: 56374 - DNA, 20 bp, synthetic construct
  misc_feature 1..20: note = chemically synthesized
  source 1..20: mol_type = other DNA
tcaaggagcagctagttggt

SEQ ID NO: 56375 - DNA, 20 bp, synthetic construct
  misc_feature 1..20: note = chemically synthesized
  source 1..20: mol_type = other DNA
caaggagcagctagttggta

SEQ ID NO: 56376 - DNA, 20 bp, synthetic construct
  misc_feature 1..20: note = chemically synthesized
  source 1..20: mol_type = other DNA
gagcagctagttggtaaggt

SEQ ID NO: 56377 - DNA, 20 bp, synthetic construct
  misc_feature 1..20: note = chemically synthesized
  source 1..20: mol_type = other DNA
tagttggtaaggtcagtgtg

SEQ ID NO: 56378 - DNA, 20 bp, synthetic construct
  misc_feature 1..20: note = chemically synthesized
  source 1..20: mol_type = other DNA
agttggtaaggtcagtgtgc

SEQ ID NO: 56379 - DNA, 20 bp, synthetic construct
  misc_feature 1..20: note = chemically synthesized
  source 1..20: mol_type = other DNA
gttggtaaggtcagtgtgca

SEQ ID NO: 56380 - DNA, 20 bp, synthetic construct
  misc_feature 1..20: note = chemically synthesized
  source 1..20: mol_type = other DNA
gtcagtgtgcagggtgcata

SEQ ID NO: 56381 - DNA, 20 bp, synthetic construct
  misc_feature 1..20: note = chemically synthesized
  source 1..20: mol_type = other DNA
tcagtgtgcagggtgcataa

SEQ ID NO: 56382 - DNA, 20 bp, synthetic construct
  misc_feature 1..20: note = chemically synthesized
  source 1..20: mol_type = other DNA
cagtgtgcagggtgcataaa

SEQ ID NO: 56383 - DNA, 20 bp, synthetic construct
  misc_feature 1..20: note = chemically synthesized
  source 1..20: mol_type = other DNA
tgtgcagggtgcataaaggg

SEQ ID NO: 56384 - DNA, 20 bp, synthetic construct
  misc_feature 1..20: note = chemically synthesized
  source 1..20: mol_type = other DNA
tgcagggtgcataaagggca

SEQ ID NO: 56385 - DNA, 20 bp, synthetic construct
  misc_feature 1..20: note = chemically synthesized
  source 1..20: mol_type = other DNA
gcagggtgcataaagggcag

SEQ ID NO: 56386 - DNA, 20 bp, synthetic construct
  misc_feature 1..20: note = chemically synthesized
  source 1..20: mol_type = other DNA
ggtgcataaagggcagaggc

SEQ ID NO: 56387 - DNA, 20 bp, synthetic construct
  misc_feature 1..20: note = chemically synthesized
  source 1..20: mol_type = other DNA
tgcataaagggcagaggccg

SEQ ID NO: 56388 - DNA, 20 bp, synthetic construct
  misc_feature 1..20: note = chemically synthesized
  source 1..20: mol_type = other DNA
gcataaagggcagaggccgg

SEQ ID NO: 56389 - DNA, 20 bp, synthetic construct
  misc_feature 1..20: note = chemically synthesized
  source 1..20: mol_type = other DNA
cataaagggcagaggccgga

SEQ ID NO: 56390 - DNA, 20 bp, synthetic construct
  misc_feature 1..20: note = chemically synthesized
  source 1..20: mol_type = other DNA
ataaagggcagaggccggag

SEQ ID NO: 56391 - DNA, 20 bp, synthetic construct
  misc_feature 1..20: note = chemically synthesized
  source 1..20: mol_type = other DNA
taaagggcagaggccggagg

SEQ ID NO: 56392 - DNA, 20 bp, synthetic construct
  misc_feature 1..20: note = chemically synthesized
  source 1..20: mol_type = other DNA
ggcagaggccggagggggtc

SEQ ID NO: 56393 - DNA, 20 bp, synthetic construct
  misc_feature 1..20: note = chemically synthesized
  source 1..20: mol_type = other DNA
gcagaggccggagggggtcc

SEQ ID NO: 56394 - DNA, 20 bp, synthetic construct
  misc_feature 1..20: note = chemically synthesized
  source 1..20: mol_type = other DNA
ggccggagggggtccaggct

SEQ ID NO: 56395 - DNA, 20 bp, synthetic construct
  misc_feature 1..20: note = chemically synthesized
  source 1..20: mol_type = other DNA
gagggggtccaggctaagtt

SEQ ID NO: 56396 - DNA, 20 bp, synthetic construct
  misc_feature 1..20: note = chemically synthesized
  source 1..20: mol_type = other DNA
ggggtccaggctaagtttag

SEQ ID NO: 56397 - DNA, 20 bp, synthetic construct
  misc_feature 1..20: note = chemically synthesized
  source 1..20: mol_type = other DNA
gggtccaggctaagtttaga

SEQ ID NO: 56398 - DNA, 20 bp, synthetic construct
  misc_feature 1..20: note = chemically synthesized
  source 1..20: mol_type = other DNA
ggctaagtttagaaggctgc

SEQ ID NO: 56399 - DNA, 20 bp, synthetic construct
  misc_feature 1..20: note = chemically synthesized
  source 1..20: mol_type = other DNA
gctaagtttagaaggctgcc

SEQ ID NO: 56400 - DNA, 20 bp, synthetic construct
  misc_feature 1..20: note = chemically synthesized
  source 1..20: mol_type = other DNA
gtttagaaggctgccaggtt

SEQ ID NO: 56401 - DNA, 20 bp, synthetic construct
  misc_feature 1..20: note = chemically synthesized
  source 1..20: mol_type = other DNA
tttagaaggctgccaggtta

SEQ ID NO: 56402 - DNA, 20 bp, synthetic construct
  misc_feature 1..20: note = chemically synthesized
  source 1..20: mol_type = other DNA
gaaggctgccaggttaaggc

SEQ ID NO: 56403 - DNA, 20 bp, synthetic construct
  misc_feature 1..20: note = chemically synthesized
  source 1..20: mol_type = other DNA
ggctgccaggttaaggccag

SEQ ID NO: 56404 - DNA, 20 bp, synthetic construct
  misc_feature 1..20: note = chemically synthesized
  source 1..20: mol_type = other DNA
gccaggttaaggccagtgga

SEQ ID NO: 56405 - DNA, 20 bp, synthetic construct
  misc_feature 1..20: note = chemically synthesized
  source 1..20: mol_type = other DNA
taaggccagtggaaagaatt

SEQ ID NO: 56406 - DNA, 20 bp, synthetic construct
  misc_feature 1..20: note = chemically synthesized
  source 1..20: mol_type = other DNA
ggccagtggaaagaattcgg

SEQ ID NO: 56407 - DNA, 20 bp, synthetic construct
  misc_feature 1..20: note = chemically synthesized
  source 1..20: mol_type = other DNA
gccagtggaaagaattcggt

SEQ ID NO: 56408 - DNA, 20 bp, synthetic construct
  misc_feature 1..20: note = chemically synthesized
  source 1..20: mol_type = other DNA
agtggaaagaattcggtggg

SEQ ID NO: 56409 - DNA, 20 bp, synthetic construct
  misc_feature 1..20: note = chemically synthesized
  source 1..20: mol_type = other DNA
gaaagaattcggtgggcagc

SEQ ID NO: 56410 - DNA, 20 bp, synthetic construct
  misc_feature 1..20: note = chemically synthesized
  source 1..20: mol_type = other DNA
aaagaattcggtgggcagcg

SEQ ID NO: 56411 - DNA, 20 bp, synthetic construct
  misc_feature 1..20: note = chemically synthesized
  source 1..20: mol_type = other DNA
agaattcggtgggcagcgag

SEQ ID NO: 56412 - DNA, 20 bp, synthetic construct
  misc_feature 1..20: note = chemically synthesized
  source 1..20: mol_type = other DNA
ggtgggcagcgaggagtcca

SEQ ID NO: 56413 - DNA, 20 bp, synthetic construct
  misc_feature 1..20: note = chemically synthesized
  source 1..20: mol_type = other DNA
gggcagcgaggagtccacag

SEQ ID NO: 56414 - DNA, 20 bp, synthetic construct
  misc_feature 1..20: note = chemically synthesized
  source 1..20: mol_type = other DNA
ggcagcgaggagtccacagt

SEQ ID NO: 56415 - DNA, 20 bp, synthetic construct
  misc_feature 1..20: note = chemically synthesized
  source 1..20: mol_type = other DNA
agtccacagtaggattgatt

SEQ ID NO: 56416 - DNA, 20 bp, synthetic construct
  misc_feature 1..20: note = chemically synthesized
  source 1..20: mol_type = other DNA
ccacagtaggattgattcag

SEQ ID NO: 56417 - DNA, 20 bp, synthetic construct
  misc_feature 1..20: note = chemically synthesized
  source 1..20: mol_type = other DNA
gattgattcagaagtctcac

SEQ ID NO: 56418 - DNA, 20 bp, synthetic construct
  misc_feature 1..20: note = chemically synthesized
  source 1..20: mol_type = other DNA
gattcagaagtctcactggt

SEQ ID NO: 56419 - DNA, 20 bp, synthetic construct
  misc_feature 1..20: note = chemically synthesized
  source 1..20: mol_type = other DNA
tcagaagtctcactggtcag

SEQ ID NO: 56420 - DNA, 20 bp, synthetic construct
  misc_feature 1..20: note = chemically synthesized
  source 1..20: mol_type = other DNA
cagaagtctcactggtcagc

SEQ ID NO: 56421 - DNA, 20 bp, synthetic construct
  misc_feature 1..20: note = chemically synthesized
  source 1..20: mol_type = other DNA
gaagtctcactggtcagcag

SEQ ID NO: 56422 - DNA, 20 bp, synthetic construct
  misc_feature 1..20: note = chemically synthesized
  source 1..20: mol_type = other DNA
ctcactggtcagcaggagac

SEQ ID NO: 56423 - DNA, 20 bp, synthetic construct
  misc_feature 1..20: note = chemically synthesized
  source 1..20: mol_type = other DNA
tcactggtcagcaggagaca

SEQ ID NO: 56424 - DNA, 20 bp, synthetic construct
  misc_feature 1..20: note = chemically synthesized
  source 1..20: mol_type = other DNA
ctggtcagcaggagacaagg

SEQ ID NO: 56425 - DNA, 20 bp, synthetic construct
  misc_feature 1..20: note = chemically synthesized
  source 1..20: mol_type = other DNA
agcaggagacaaggtggacc

SEQ ID NO: 56426 - DNA, 20 bp, synthetic construct
  misc_feature 1..20: note = chemically synthesized
  source 1..20: mol_type = other DNA
gcaggagacaaggtggaccc

SEQ ID NO: 56427 - DNA, 20 bp, synthetic construct
  misc_feature 1..20: note = chemically synthesized
  source 1..20: mol_type = other DNA
tggacccaggaaacactgaa

SEQ ID NO: 56428 - DNA, 20 bp, synthetic construct
  misc_feature 1..20: note = chemically synthesized
  source 1..20: mol_type = other DNA
ggacccaggaaacactgaaa

SEQ ID NO: 56429 - DNA, 20 bp, synthetic construct
  misc_feature 1..20: note = chemically synthesized
  source 1..20: mol_type = other DNA
cccaggaaacactgaaaagg

SEQ ID NO: 56430 - DNA, 20 bp, synthetic construct
  misc_feature 1..20: note = chemically synthesized
  source 1..20: mol_type = other DNA
ccaggaaacactgaaaaggt

SEQ ID NO: 56431 - DNA, 20 bp, synthetic construct
  misc_feature 1..20: note = chemically synthesized
  source 1..20: mol_type = other DNA
aaacactgaaaaggtgggcc

SEQ ID NO: 56432 - DNA, 20 bp, synthetic construct
  misc_feature 1..20: note = chemically synthesized
  source 1..20: mol_type = other DNA
cactgaaaaggtgggcccgg

SEQ ID NO: 56433 - DNA, 20 bp, synthetic construct
  misc_feature 1..20: note = chemically synthesized
  source 1..20: mol_type = other DNA
aaggtgggcccggcagaact

SEQ ID NO: 56434 - DNA, 20 bp, synthetic construct
  misc_feature 1..20: note = chemically synthesized
  source 1..20: mol_type = other DNA
ggtgggcccggcagaacttg

SEQ ID NO: 56435 - DNA, 20 bp, synthetic construct
  misc_feature 1..20: note = chemically synthesized
  source 1..20: mol_type = other DNA
gcccggcagaacttggagtc

SEQ ID NO: 56436 - DNA, 20 bp, synthetic construct
  misc_feature 1..20: note = chemically synthesized
  source 1..20: mol_type = other DNA
ttggagtctggcatcccacg

SEQ ID NO: 56437 - DNA, 20 bp, synthetic construct
  misc_feature 1..20: note = chemically synthesized
  source 1..20: mol_type = other DNA
tggagtctggcatcccacgc

SEQ ID NO: 56438 - DNA, 20 bp, synthetic construct
  misc_feature 1..20: note = chemically synthesized
  source 1..20: mol_type = other DNA
ggagtctggcatcccacgca

SEQ ID NO: 56439 - DNA, 20 bp, synthetic construct
  misc_feature 1..20: note = chemically synthesized
  source 1..20: mol_type = other DNA
tctggcatcccacgcagggt

SEQ ID NO: 56440 - DNA, 20 bp, synthetic construct
  misc_feature 1..20: note = chemically synthesized
  source 1..20: mol_type = other DNA
tggcatcccacgcagggtga

SEQ ID NO: 56441 - DNA, 20 bp, synthetic construct
  misc_feature 1..20: note = chemically synthesized
  source 1..20: mol_type = other DNA
ggcatcccacgcagggtgag

SEQ ID NO: 56442 - DNA, 20 bp, synthetic construct
  misc_feature 1..20: note = chemically synthesized
  source 1..20: mol_type = other DNA
atcccacgcagggtgagagg

SEQ ID NO: 56443 - DNA, 20 bp, synthetic construct
  misc_feature 1..20: note = chemically synthesized
  source 1..20: mol_type = other DNA
tcccacgcagggtgagaggc

SEQ ID NO: 56444 - DNA, 20 bp, synthetic construct
  misc_feature 1..20: note = chemically synthesized
  source 1..20: mol_type = other DNA
ccacgcagggtgagaggcgg

SEQ ID NO: 56445 - DNA, 20 bp, synthetic construct
  misc_feature 1..20: note = chemically synthesized
  source 1..20: mol_type = other DNA
acgcagggtgagaggcggga

SEQ ID NO: 56446 - DNA, 20 bp, synthetic construct
  misc_feature 1..20: note = chemically synthesized
  source 1..20: mol_type = other DNA
cgcagggtgagaggcgggag

SEQ ID NO: 56447 - DNA, 20 bp, synthetic construct
  misc_feature 1..20: note = chemically synthesized
  source 1..20: mol_type = other DNA
cagggtgagaggcgggagag

SEQ ID NO: 56448 - DNA, 20 bp, synthetic construct
  misc_feature 1..20: note = chemically synthesized
  source 1..20: mol_type = other DNA
agggtgagaggcgggagagg

SEQ ID NO: 56449 - DNA, 20 bp, synthetic construct
  misc_feature 1..20: note = chemically synthesized
  source 1..20: mol_type = other DNA
ggtgagaggcgggagaggag

SEQ ID NO: 56450 - DNA, 20 bp, synthetic construct
  misc_feature 1..20: note = chemically synthesized
  source 1..20: mol_type = other DNA
ggcgggagaggaggagcccc

SEQ ID NO: 56451 - DNA, 20 bp, synthetic construct
  misc_feature 1..20: note = chemically synthesized
  source 1..20: mol_type = other DNA
gcgggagaggaggagcccct

SEQ ID NO: 56452 - DNA, 20 bp, synthetic construct
  misc_feature 1..20: note = chemically synthesized
  source 1..20: mol_type = other DNA
cgggagaggaggagccccta

SEQ ID NO: 56453 - DNA, 20 bp, synthetic construct
  misc_feature 1..20: note = chemically synthesized
  source 1..20: mol_type = other DNA
aggaggagcccctagggcgc

SEQ ID NO: 56454 - DNA, 20 bp, synthetic construct
  misc_feature 1..20: note = chemically synthesized
  source 1..20: mol_type = other DNA
tagggcgccggcctgccttc

SEQ ID NO: 56455 - DNA, 20 bp, synthetic construct
  misc_feature 1..20: note = chemically synthesized
  source 1..20: mol_type = other DNA
cgccggcctgccttccagcc

SEQ ID NO: 56456 - DNA, 20 bp, synthetic construct
  misc_feature 1..20: note = chemically synthesized
  source 1..20: mol_type = other DNA
ggcctgccttccagcccagt

SEQ ID NO: 56457 - DNA, 20 bp, synthetic construct
  misc_feature 1..20: note = chemically synthesized
  source 1..20: mol_type = other DNA
gcctgccttccagcccagtt

SEQ ID NO: 56458 - DNA, 20 bp, synthetic construct
  misc_feature 1..20: note = chemically synthesized
  source 1..20: mol_type = other DNA
cttccagcccagttaggatt

SEQ ID NO: 56459 - DNA, 20 bp, synthetic construct
  misc_feature 1..20: note = chemically synthesized
  source 1..20: mol_type = other DNA
ttccagcccagttaggattt

SEQ ID NO: 56460 - DNA, 20 bp, synthetic construct
  misc_feature 1..20: note = chemically synthesized
  source 1..20: mol_type = other DNA
ccagcccagttaggatttgg

SEQ ID NO: 56461 - DNA, 20 bp, synthetic construct
  misc_feature 1..20: note = chemically synthesized
  source 1..20: mol_type = other DNA
gcgcgtaatctgacgctgtt

SEQ ID NO: 56462 - DNA, 20 bp, synthetic construct
  misc_feature 1..20: note = chemically synthesized
  source 1..20: mol_type = other DNA
cgcgtaatctgacgctgttt

SEQ ID NO: 56463 - DNA, 20 bp, synthetic construct
  misc_feature 1..20: note = chemically synthesized
  source 1..20: mol_type = other DNA
gcgtaatctgacgctgtttg

SEQ ID NO: 56464 - DNA, 20 bp, synthetic construct
  misc_feature 1..20: note = chemically synthesized
  source 1..20: mol_type = other DNA
gtaatctgacgctgtttggg

SEQ ID NO: 56465 - DNA, 20 bp, synthetic construct
  misc_feature 1..20: note = chemically synthesized
  source 1..20: mol_type = other DNA
taatctgacgctgtttgggg

SEQ ID NO: 56466 - DNA, 20 bp, synthetic construct
  misc_feature 1..20: note = chemically synthesized
  source 1..20: mol_type = other DNA
aatctgacgctgtttgggga

SEQ ID NO: 56467 - DNA, 20 bp, synthetic construct
  misc_feature 1..20: note = chemically synthesized
  source 1..20: mol_type = other DNA
tgacgctgtttggggagggc

SEQ ID NO: 56468 - DNA, 20 bp, synthetic construct
  misc_feature 1..20: note = chemically synthesized
  source 1..20: mol_type = other DNA
gacgctgtttggggagggcg

SEQ ID NO: 56469 - DNA, 20 bp, synthetic construct
  misc_feature 1..20: note = chemically synthesized
  source 1..20: mol_type = other DNA
gaggccgaaacctgatcctc

SEQ ID NO: 56470 - DNA, 20 bp, synthetic construct
  misc_feature 1..20: note = chemically synthesized
  source 1..20: mol_type = other DNA
cgaaacctgatcctccagtc

SEQ ID NO: 56471 - DNA, 20 bp, synthetic construct
  misc_feature 1..20: note = chemically synthesized
  source 1..20: mol_type = other DNA
gaaacctgatcctccagtcc

SEQ ID NO: 56472 - DNA, 20 bp, synthetic construct
  misc_feature 1..20: note = chemically synthesized
  source 1..20: mol_type = other DNA
aaacctgatcctccagtccg

SEQ ID NO: 56473 - DNA, 20 bp, synthetic construct
  misc_feature 1..20: note = chemically synthesized
  source 1..20: mol_type = other DNA
aacctgatcctccagtccgg

SEQ ID NO: 56474 - DNA, 20 bp, synthetic construct
  misc_feature 1..20: note = chemically synthesized
  source 1..20: mol_type = other DNA
gggttccgttaatgtttaat

SEQ ID NO: 56475 - DNA, 20 bp, synthetic construct
  misc_feature 1..20: note = chemically synthesized
  source 1..20: mol_type = other DNA
tccgttaatgtttaatcaga

SEQ ID NO: 56476 - DNA, 20 bp, synthetic construct
  misc_feature 1..20: note = chemically synthesized
  source 1..20: mol_type = other DNA
ccgttaatgtttaatcagat

SEQ ID NO: 56477 - DNA, 20 bp, synthetic construct
  misc_feature 1..20: note = chemically synthesized
  source 1..20: mol_type = other DNA
aatcagataggatcgtccga

SEQ ID NO: 56478 - DNA, 20 bp, synthetic construct
  misc_feature 1..20: note = chemically synthesized
  source 1..20: mol_type = other DNA
atcagataggatcgtccgat

SEQ ID NO: 56479 - DNA, 20 bp, synthetic construct
  misc_feature 1..20: note = chemically synthesized
  source 1..20: mol_type = other DNA
tcagataggatcgtccgatg

SEQ ID NO: 56480 - DNA, 20 bp, synthetic construct
  misc_feature 1..20: note = chemically synthesized
  source 1..20: mol_type = other DNA
aggatcgtccgatggggctc

SEQ ID NO: 56481 - DNA, 20 bp, synthetic construct
  misc_feature 1..20: note = chemically synthesized
  source 1..20: mol_type = other DNA
atcgtccgatggggctctgg

SEQ ID NO: 56482 - DNA, 20 bp, synthetic construct
  misc_feature 1..20: note = chemically synthesized
  source 1..20: mol_type = other DNA
gtggcgtgatctgcgcgccc

SEQ ID NO: 56483 - DNA, 20 bp, synthetic construct
  misc_feature 1..20: note = chemically synthesized
  source 1..20: mol_type = other DNA
tggcgtgatctgcgcgcccc

SEQ ID NO: 56484 - DNA, 20 bp, synthetic construct
  misc_feature 1..20: note = chemically synthesized
  source 1..20: mol_type = other DNA
atctgcgcgccccaggcgtc

SEQ ID NO: 56485 - DNA, 20 bp, synthetic construct
  misc_feature 1..20: note = chemically synthesized
  source 1..20: mol_type = other DNA
ggcgtcaagcacccacaccc

SEQ ID NO: 56486 - DNA, 20 bp, synthetic construct
  misc_feature 1..20: note = chemically synthesized
  source 1..20: mol_type = other DNA
gtcaagcacccacaccctag

SEQ ID NO: 56487 - DNA, 20 bp, synthetic construct
  misc_feature 1..20: note = chemically synthesized
  source 1..20: mol_type = other DNA
tcaagcacccacaccctaga

SEQ ID NO: 56488 - DNA, 20 bp, synthetic construct
  misc_feature 1..20: note = chemically synthesized
  source 1..20: mol_type = other DNA
cacaccctagaaggtttccg

SEQ ID NO: 56489 - DNA, 20 bp, synthetic construct
  misc_feature 1..20: note = chemically synthesized
  source 1..20: mol_type = other DNA
aaggtttccgcagcgacgtc

SEQ ID NO: 56490 - DNA, 20 bp, synthetic construct
  misc_feature 1..20: note = chemically synthesized
  source 1..20: mol_type = other DNA
aggtttccgcagcgacgtcg

SEQ ID NO: 56491 - DNA, 20 bp, synthetic construct
  misc_feature 1..20: note = chemically synthesized
  source 1..20: mol_type = other DNA
cagcgacgtcgaggcgctca

SEQ ID NO: 56492 - DNA, 20 bp, synthetic construct
  misc_feature 1..20: note = chemically synthesized
  source 1..20: mol_type = other DNA
cgtcgaggcgctcatggttg

SEQ ID NO: 56493 - DNA, 20 bp, synthetic construct
  misc_feature 1..20: note = chemically synthesized
  source 1..20: mol_type = other DNA
gtcgaggcgctcatggttgc

SEQ ID NO: 56494 - DNA, 20 bp, synthetic construct
  misc_feature 1..20: note = chemically synthesized
  source 1..20: mol_type = other DNA
gaggcgctcatggttgcagg

SEQ ID NO: 56495 - DNA, 20 bp, synthetic construct
  misc_feature 1..20: note = chemically synthesized
  source 1..20: mol_type = other DNA
aggcgctcatggttgcaggc

SEQ ID NO: 56496 - DNA, 20 bp, synthetic construct
  misc_feature 1..20: note = chemically synthesized
  source 1..20: mol_type = other DNA
tgcaggcgggcgccgccgtt

SEQ ID NO: 56497 - DNA, 20 bp, synthetic construct
  misc_feature 1..20: note = chemically synthesized
  source 1..20: mol_type = other DNA
gcgggcgccgccgttcagtt

SEQ ID NO: 56498 - DNA, 20 bp, synthetic construct
  misc_feature 1..20: note = chemically synthesized
  source 1..20: mol_type = other DNA
cgggcgccgccgttcagttc

SEQ ID NO: 56499 - DNA, 20 bp, synthetic construct
  misc_feature 1..20: note = chemically synthesized
  source 1..20: mol_type = other DNA
gggcgccgccgttcagttca

SEQ ID NO: 56500 - DNA, 20 bp, synthetic construct
  misc_feature 1..20: note = chemically synthesized
  source 1..20: mol_type = other DNA
cgccgttcagttcagggtct

SEQ ID NO: 56501 - DNA, 20 bp, synthetic construct
  misc_feature 1..20: note = chemically synthesized
  source 1..20: mol_type = other DNA
ttcagttcagggtctgagcc

SEQ ID NO: 56502 - DNA, 20 bp, synthetic construct
  misc_feature 1..20: note = chemically synthesized
  source 1..20: mol_type = other DNA
cagttcagggtctgagcctg

SEQ ID NO: 56503 - DNA, 20 bp, synthetic construct
  misc_feature 1..20: note = chemically synthesized
  source 1..20: mol_type = other DNA
agttcagggtctgagcctgg

SEQ ID NO: 56504 - DNA, 20 bp, synthetic construct
  misc_feature 1..20: note = chemically synthesized
  source 1..20: mol_type = other DNA
ttcagggtctgagcctggag

SEQ ID NO: 56505 - DNA, 20 bp, synthetic construct
  misc_feature 1..20: note = chemically synthesized
  source 1..20: mol_type = other DNA
gggtctgagcctggaggagt

SEQ ID NO: 56506 - DNA, 20 bp, synthetic construct
  misc_feature 1..20: note = chemically synthesized
  source 1..20: mol_type = other DNA
ctgagcctggaggagtgagc

SEQ ID NO: 56507 - DNA, 20 bp, synthetic construct
  misc_feature 1..20: note = chemically synthesized
  source 1..20: mol_type = other DNA
tgagcctggaggagtgagcc

SEQ ID NO: 56508 - DNA, 20 bp, synthetic construct
  misc_feature 1..20: note = chemically synthesized
  source 1..20: mol_type = other DNA
gcctggaggagtgagccagg

SEQ ID NO: 56509 - DNA, 20 bp, synthetic construct
  misc_feature 1..20: note = chemically synthesized
  source 1..20: mol_type = other DNA
ggaggagtgagccaggcagt

SEQ ID NO: 56510 - DNA, 20 bp, synthetic construct
  misc_feature 1..20: note = chemically synthesized
  source 1..20: mol_type = other DNA
agtgagccaggcagtgagac

SEQ ID NO: 56511 - DNA, 20 bp, synthetic construct
  misc_feature 1..20: note = chemically synthesized
  source 1..20: mol_type = other DNA
gccaggcagtgagactggct

SEQ ID NO: 56512 - DNA, 20 bp, synthetic construct
  misc_feature 1..20: note = chemically synthesized
  source 1..20: mol_type = other DNA
ccaggcagtgagactggctc

SEQ ID NO: 56513 - DNA, 20 bp, synthetic construct
  misc_feature 1..20: note = chemically synthesized
  source 1..20: mol_type = other DNA
ggcagtgagactggctcggg

SEQ ID NO: 56514 - DNA, 20 bp, synthetic construct
  misc_feature 1..20: note = chemically synthesized
  source 1..20: mol_type = other DNA
gcagtgagactggctcgggc

SEQ ID NO: 56515 - DNA, 20 bp, synthetic construct
  misc_feature 1..20: note = chemically synthesized
  source 1..20: mol_type = other DNA
tgagactggctcgggcgggc

SEQ ID NO: 56516 - DNA, 20 bp, synthetic construct
  misc_feature 1..20: note = chemically synthesized
  source 1..20: mol_type = other DNA
gagactggctcgggcgggcc

SEQ ID NO: 56517 - DNA, 20 bp, synthetic construct
  misc_feature 1..20: note = chemically synthesized
  source 1..20: mol_type = other DNA
cgggccgggacgcgtcgttg

SEQ ID NO: 56518 - DNA, 20 bp, synthetic construct
  misc_feature 1..20: note = chemically synthesized
  source 1..20: mol_type = other DNA
gccgggacgcgtcgttgcag

SEQ ID NO: 56519 - DNA, 20 bp, synthetic construct
  misc_feature 1..20: note = chemically synthesized
  source 1..20: mol_type = other DNA
gggacgcgtcgttgcagcag

SEQ ID NO: 56520 - DNA, 20 bp, synthetic construct
  misc_feature 1..20: note = chemically synthesized
  source 1..20: mol_type = other DNA
gtcgttgcagcagcggctcc

SEQ ID NO: 56521 - DNA, 20 bp, synthetic construct
  misc_feature 1..20: note = chemically synthesized
  source 1..20: mol_type = other DNA
cagcagcggctcccagctcc

SEQ ID NO: 56522 - DNA, 20 bp, synthetic construct
  misc_feature 1..20: note = chemically synthesized
  source 1..20: mol_type = other DNA
agcggctcccagctcccagc

SEQ ID NO: 56523 - DNA, 20 bp, synthetic construct
  misc_feature 1..20: note = chemically synthesized
  source 1..20: mol_type = other DNA
gcggctcccagctcccagcc

SEQ ID NO: 56524 - DNA, 20 bp, synthetic construct
  misc_feature 1..20: note = chemically synthesized
  source 1..20: mol_type = other DNA
cgcgccctgctcctgaactt

SEQ ID NO: 56525 - DNA, 20 bp, synthetic construct
  misc_feature 1..20: note = chemically synthesized
  source 1..20: mol_type = other DNA
cctgaacttcagctcctgca

SEQ ID NO: 56526 - DNA, 20 bp, synthetic construct
  misc_feature 1..20: note = chemically synthesized
  source 1..20: mol_type = other DNA
tgcacagtcctccccaccgc

SEQ ID NO: 56527 - DNA, 20 bp, synthetic construct
  misc_feature 1..20: note = chemically synthesized
  source 1..20: mol_type = other DNA
gcacagtcctccccaccgca

SEQ ID NO: 56528 - DNA, 20 bp, synthetic construct
  misc_feature 1..20: note = chemically synthesized
  source 1..20: mol_type = other DNA
tcctccccaccgcaaggctc

SEQ ID NO: 56529 - DNA, 20 bp, synthetic construct
  misc_feature 1..20: note = chemically synthesized
  source 1..20: mol_type = other DNA
cctccccaccgcaaggctca

SEQ ID NO: 56530 - DNA, 20 bp, synthetic construct
  misc_feature 1..20: note = chemically synthesized
  source 1..20: mol_type = other DNA
cgcaaggctcaaggcgccgc

SEQ ID NO: 56531 - DNA, 20 bp, synthetic construct
  misc_feature 1..20: note = chemically synthesized
  source 1..20: mol_type = other DNA
ggctcaaggcgccgccggcg

SEQ ID NO: 56532 - DNA, 20 bp, synthetic construct
  misc_feature 1..20: note = chemically synthesized
  source 1..20: mol_type = other DNA
ccgccggcgtggaccgcgca

SEQ ID NO: 56533 - DNA, 20 bp, synthetic construct
  misc_feature 1..20: note = chemically synthesized
  source 1..20: mol_type = other DNA
cgtggaccgcgcacggcctc

SEQ ID NO: 56534 - DNA, 20 bp, synthetic construct
  misc_feature 1..20: note = chemically synthesized
  source 1..20: mol_type = other DNA
gtggaccgcgcacggcctct

SEQ ID NO: 56535 - DNA, 20 bp, synthetic construct
  misc_feature 1..20: note = chemically synthesized
  source 1..20: mol_type = other DNA
cggcctctaggtctcctcgc

SEQ ID NO: 56536 - DNA, 20 bp, synthetic construct
  misc_feature 1..20: note = chemically synthesized
  source 1..20: mol_type = other DNA
ggcctctaggtctcctcgcc

SEQ ID NO: 56537 - DNA, 20 bp, synthetic construct
  misc_feature 1..20: note = chemically synthesized
  source 1..20: mol_type = other DNA
tctaggtctcctcgccagga

SEQ ID NO: 56538 - DNA, 20 bp, synthetic construct
  misc_feature 1..20: note = chemically synthesized
  source 1..20: mol_type = other DNA
caggacagcaacctctcccc

SEQ ID NO: 56539 - DNA, 20 bp, synthetic construct
  misc_feature 1..20: note = chemically synthesized
  source 1..20: mol_type = other DNA
aacctctcccctggccctca

SEQ ID NO: 56540 - DNA, 20 bp, synthetic construct
  misc_feature 1..20: note = chemically synthesized
  source 1..20: mol_type = other DNA
acctctcccctggccctcat

SEQ ID NO: 56541 - DNA, 20 bp, synthetic construct
  misc_feature 1..20: note = chemically synthesized
  source 1..20: mol_type = other DNA
ctggccctcatgggcaccgt

SEQ ID NO: 56542 - DNA, 20 bp, synthetic construct
  misc_feature 1..20: note = chemically synthesized
  source 1..20: mol_type = other DNA
ctcatgggcaccgtcagctc

SEQ ID NO: 56543 - DNA, 20 bp, synthetic construct
  misc_feature 1..20: note = chemically synthesized
  source 1..20: mol_type = other DNA
tcatgggcaccgtcagctcc

SEQ ID NO: 56544 - DNA, 20 bp, synthetic construct
  misc_feature 1..20: note = chemically synthesized
  source 1..20: mol_type = other DNA
tgggcaccgtcagctccagg

SEQ ID NO: 56545 - DNA, 20 bp, synthetic construct
  misc_feature 1..20: note = chemically synthesized
  source 1..20: mol_type = other DNA
ccgtcagctccaggcggtcc

SEQ ID NO: 56546 - DNA, 20 bp, synthetic construct
  misc_feature 1..20: note = chemically synthesized
  source 1..20: mol_type = other DNA
tcagctccaggcggtcctgg

SEQ ID NO: 56547 - DNA, 20 bp, synthetic construct
  misc_feature 1..20: note = chemically synthesized
  source 1..20: mol_type = other DNA
gctgctgctgctgctgctcc

SEQ ID NO: 56548 - DNA, 20 bp, synthetic construct
  misc_feature 1..20: note = chemically synthesized
  source 1..20: mol_type = other DNA
ctgctgctgctgctgctcct

SEQ ID NO: 56549 - DNA, 20 bp, synthetic construct
  misc_feature 1..20: note = chemically synthesized
  source 1..20: mol_type = other DNA
gctgctgctcctgggtcccg

SEQ ID NO: 56550 - DNA, 20 bp, synthetic construct
  misc_feature 1..20: note = chemically synthesized
  source 1..20: mol_type = other DNA
ctgctgctcctgggtcccgc

SEQ ID NO: 56551 - DNA, 20 bp, synthetic construct
  misc_feature 1..20: note = chemically synthesized
  source 1..20: mol_type = other DNA
gtcccgcgggcgcccgtgcg

SEQ ID NO: 56552 - DNA, 20 bp, synthetic construct
  misc_feature 1..20: note = chemically synthesized
  source 1..20: mol_type = other DNA
tcccgcgggcgcccgtgcgc

SEQ ID NO: 56553 - DNA, 20 bp, synthetic construct
  misc_feature 1..20: note = chemically synthesized
  source 1..20: mol_type = other DNA
ccgcgggcgcccgtgcgcag

SEQ ID NO: 56554 - DNA, 20 bp, synthetic construct
  misc_feature 1..20: note = chemically synthesized
  source 1..20: mol_type = other DNA
cgcgggcgcccgtgcgcagg

SEQ ID NO: 56555 - DNA, 20 bp, synthetic construct
  misc_feature 1..20: note = chemically synthesized
  source 1..20: mol_type = other DNA
gcgcccgtgcgcaggaggac

SEQ ID NO: 56556 - DNA, 20 bp, synthetic construct
  misc_feature 1..20: note = chemically synthesized
  source 1..20: mol_type = other DNA
cgcccgtgcgcaggaggacg

SEQ ID NO: 56557 - DNA, 20 bp, synthetic construct
  misc_feature 1..20: note = chemically synthesized
  source 1..20: mol_type = other DNA
cgtgcgcaggaggacgagga

SEQ ID NO: 56558 - DNA, 20 bp, synthetic construct
  misc_feature 1..20: note = chemically synthesized
  source 1..20: mol_type = other DNA
aggacgaggacggcgactac

SEQ ID NO: 56559 - DNA, 20 bp, synthetic construct
  misc_feature 1..20: note = chemically synthesized
  source 1..20: mol_type = other DNA
ggacgaggacggcgactacg

SEQ ID NO: 56560 - DNA, 20 bp, synthetic construct
  misc_feature 1..20: note = chemically synthesized
  source 1..20: mol_type = other DNA
acgaggacggcgactacgag

SEQ ID NO: 56561 - DNA, 20 bp, synthetic construct
  misc_feature 1..20: note = chemically synthesized
  source 1..20: mol_type = other DNA
ggacggcgactacgaggagc

SEQ ID NO: 56562 - DNA, 20 bp, synthetic construct
  misc_feature 1..20: note = chemically synthesized
  source 1..20: mol_type = other DNA
cgactacgaggagctggtgc

SEQ ID NO: 56563 - DNA, 20 bp, synthetic construct
  misc_feature 1..20: note = chemically synthesized
  source 1..20: mol_type = other DNA
tggtgctagccttgcgttcc

SEQ ID NO: 56564 - DNA, 20 bp, synthetic construct
  misc_feature 1..20: note = chemically synthesized
  source 1..20: mol_type = other DNA
ggtgctagccttgcgttccg

SEQ ID NO: 56565 - DNA, 20 bp, synthetic construct
  misc_feature 1..20: note = chemically synthesized
  source 1..20: mol_type = other DNA
tgctagccttgcgttccgag

SEQ ID NO: 56566 - DNA, 20 bp, synthetic construct
  misc_feature 1..20: note = chemically synthesized
  source 1..20: mol_type = other DNA
gctagccttgcgttccgagg

SEQ ID NO: 56567 - DNA, 20 bp, synthetic construct
  misc_feature 1..20: note = chemically synthesized
  source 1..20: mol_type = other DNA
gccttgcgttccgaggagga

SEQ ID NO: 56568 - DNA, 20 bp, synthetic construct
  misc_feature 1..20: note = chemically synthesized
  source 1..20: mol_type = other DNA
gcgttccgaggaggacggcc

SEQ ID NO: 56569 - DNA, 20 bp, synthetic construct
  misc_feature 1..20: note = chemically synthesized
  source 1..20: mol_type = other DNA
cgaggaggacggcctggccg

SEQ ID NO: 56570 - DNA, 20 bp, synthetic construct
  misc_feature 1..20: note = chemically synthesized
  source 1..20: mol_type = other DNA
acggcctggccgaagcaccc

SEQ ID NO: 56571 - DNA, 20 bp, synthetic construct
  misc_feature 1..20: note = chemically synthesized
  source 1..20: mol_type = other DNA
ctggccgaagcacccgagca

SEQ ID NO: 56572 - DNA, 20 bp, synthetic construct
  misc_feature 1..20: note = chemically synthesized
  source 1..20: mol_type = other DNA
agcacccgagcacggaacca

SEQ ID NO: 56573 - DNA, 20 bp, synthetic construct
  misc_feature 1..20: note = chemically synthesized
  source 1..20: mol_type = other DNA
ccaccttccaccgctgcgcc

SEQ ID NO: 56574 - DNA, 20 bp, synthetic construct
  misc_feature 1..20: note = chemically synthesized
  source 1..20: mol_type = other DNA
caccttccaccgctgcgcca

SEQ ID NO: 56575 - DNA, 20 bp, synthetic construct
  misc_feature 1..20: note = chemically synthesized
  source 1..20: mol_type = other DNA
tccaccgctgcgccaaggtg

SEQ ID NO: 56576 - DNA, 20 bp, synthetic construct
  misc_feature 1..20: note = chemically synthesized
  source 1..20: mol_type = other DNA
ccaccgctgcgccaaggtgc

SEQ ID NO: 56577 - DNA, 20 bp, synthetic construct
  misc_feature 1..20: note = chemically synthesized
  source 1..20: mol_type = other DNA
gctgcgccaaggtgcgggtg

SEQ ID NO: 56578 - DNA, 20 bp, synthetic construct
  misc_feature 1..20: note = chemically synthesized
  source 1..20: mol_type = other DNA
ctgcgccaaggtgcgggtgt

SEQ ID NO: 56579 - DNA, 20 bp, synthetic construct
  misc_feature 1..20: note = chemically synthesized
  source 1..20: mol_type = other DNA
tgcgccaaggtgcgggtgta

SEQ ID NO: 56580 - DNA, 20 bp, synthetic construct
  misc_feature 1..20: note = chemically synthesized
  source 1..20: mol_type = other DNA
ccaaggtgcgggtgtaggga

SEQ ID NO: 56581 - DNA, 20 bp, synthetic construct
  misc_feature 1..20: note = chemically synthesized
  source 1..20: mol_type = other DNA
caaggtgcgggtgtagggat

SEQ ID NO: 56582 - DNA, 20 bp, synthetic construct
  misc_feature 1..20: note = chemically synthesized
  source 1..20: mol_type = other DNA
aggtgcgggtgtagggatgg

SEQ ID NO: 56583 - DNA, 20 bp, synthetic construct
  misc_feature 1..20: note = chemically synthesized
  source 1..20: mol_type = other DNA
ggtgcgggtgtagggatggg

SEQ ID NO: 56584 - DNA, 20 bp, synthetic construct
  misc_feature 1..20: note = chemically synthesized
  source 1..20: mol_type = other DNA
cgggtgtagggatgggaggc

SEQ ID NO: 56585 - DNA, 20 bp, synthetic construct
  misc_feature 1..20: note = chemically synthesized
  source 1..20: mol_type = other DNA
gggtgtagggatgggaggcc

SEQ ID NO: 56586 - DNA, 20 bp, synthetic construct
  misc_feature 1..20: note = chemically synthesized
  source 1..20: mol_type = other DNA
ggtgtagggatgggaggccg

SEQ ID NO: 56587 - DNA, 20 bp, synthetic construct
  misc_feature 1..20: note = chemically synthesized
  source 1..20: mol_type = other DNA
gggaggccggggcgaacccg

SEQ ID NO: 56588 - DNA, 20 bp, synthetic construct
  misc_feature 1..20: note = chemically synthesized
  source 1..20: mol_type = other DNA
ggccggggcgaacccgcagc

SEQ ID NO: 56589 - DNA, 20 bp, synthetic construct
  misc_feature 1..20: note = chemically synthesized
  source 1..20: mol_type = other DNA
gccggggcgaacccgcagcc

SEQ ID NO: 56590 - DNA, 20 bp, synthetic construct
  misc_feature 1..20: note = chemically synthesized
  source 1..20: mol_type = other DNA
gggcgaacccgcagccggga

SEQ ID NO: 56591 - DNA, 20 bp, synthetic construct
  misc_feature 1..20: note = chemically synthesized
  source 1..20: mol_type = other DNA
aacccgcagccgggacggtg

SEQ ID NO: 56592 - DNA, 20 bp, synthetic construct
  misc_feature 1..20: note = chemically synthesized
  source 1..20: mol_type = other DNA
ggtgcggtgctgtttcctct

SEQ ID NO: 56593 - DNA, 20 bp, synthetic construct
  misc_feature 1..20: note = chemically synthesized
  source 1..20: mol_type = other DNA
gtgcggtgctgtttcctctc

SEQ ID NO: 56594 - DNA, 20 bp, synthetic construct
  misc_feature 1..20: note = chemically synthesized
  source 1..20: mol_type = other DNA
tgctgtttcctctcgggcct

SEQ ID NO: 56595 - DNA, 20 bp, synthetic construct
  misc_feature 1..20: note = chemically synthesized
  source 1..20: mol_type = other DNA
gcctcagtttccccccatgt

SEQ ID NO: 56596 - DNA, 20 bp, synthetic construct
  misc_feature 1..20: note = chemically synthesized
  source 1..20: mol_type = other DNA
ctcagtttccccccatgtaa

SEQ ID NO: 56597 - DNA, 20 bp, synthetic construct
  misc_feature 1..20: note = chemically synthesized
  source 1..20: mol_type = other DNA
cagtttccccccatgtaaga

SEQ ID NO: 56598 - DNA, 20 bp, synthetic construct
  misc_feature 1..20: note = chemically synthesized
  source 1..20: mol_type = other DNA
agtttccccccatgtaagag

SEQ ID NO: 56599 - DNA, 20 bp, synthetic construct
  misc_feature 1..20: note = chemically synthesized
  source 1..20: mol_type = other DNA
ttccccccatgtaagagagg

SEQ ID NO: 56600 - DNA, 20 bp, synthetic construct
  misc_feature 1..20: note = chemically synthesized
  source 1..20: mol_type = other DNA
cccccatgtaagagaggaag

SEQ ID NO: 56601 - DNA, 20 bp, synthetic construct
  misc_feature 1..20: note = chemically synthesized
  source 1..20: mol_type = other DNA
cccatgtaagagaggaagtg

SEQ ID NO: 56602 - DNA, 20 bp, synthetic construct
  misc_feature 1..20: note = chemically synthesized
  source 1..20: mol_type = other DNA
gtaagagaggaagtggagtg

SEQ ID NO: 56603 - DNA, 20 bp, synthetic construct
  misc_feature 1..20: note = chemically synthesized
  source 1..20: mol_type = other DNA
taagagaggaagtggagtgc

SEQ ID NO: 56604 - DNA, 20 bp, synthetic construct
  misc_feature 1..20: note = chemically synthesized
  source 1..20: mol_type = other DNA
gaagtggagtgcaggtcgcc

SEQ ID NO: 56605 - DNA, 20 bp, synthetic construct
  misc_feature 1..20: note = chemically synthesized
  source 1..20: mol_type = other DNA
aagtggagtgcaggtcgccg

SEQ ID NO: 56606 - DNA, 20 bp, synthetic construct
  misc_feature 1..20: note = chemically synthesized
  source 1..20: mol_type = other DNA
agtggagtgcaggtcgccga

SEQ ID NO: 56607 - DNA, 20 bp, synthetic construct
  misc_feature 1..20: note = chemically synthesized
  source 1..20: mol_type = other DNA
gtcgccgagggctcttcgct

SEQ ID NO: 56608 - DNA, 20 bp, synthetic construct
  misc_feature 1..20: note = chemically synthesized
  source 1..20: mol_type = other DNA
ctcttcgcttggcacgatct

SEQ ID NO: 56609 - DNA, 20 bp, synthetic construct
  misc_feature 1..20: note = chemically synthesized
  source 1..20: mol_type = other DNA
tcttcgcttggcacgatctt

SEQ ID NO: 56610 - DNA, 20 bp, synthetic construct
  misc_feature 1..20: note = chemically synthesized
  source 1..20: mol_type = other DNA
cttcgcttggcacgatcttg

SEQ ID NO: 56611 - DNA, 20 bp, synthetic construct
  misc_feature 1..20: note = chemically synthesized
  source 1..20: mol_type = other DNA
tggcacgatcttggggactg

SEQ ID NO: 56612 - DNA, 20 bp, synthetic construct
  misc_feature 1..20: note = chemically synthesized
  source 1..20: mol_type = other DNA
ggcacgatcttggggactgc

SEQ ID NO: 56613 - DNA, 20 bp, synthetic construct
  misc_feature 1..20: note = chemically synthesized
  source 1..20: mol_type = other DNA
cgatcttggggactgcaggc

SEQ ID NO: 56614 - DNA, 20 bp, synthetic construct
  misc_feature 1..20: note = chemically synthesized
  source 1..20: mol_type = other DNA
gatcttggggactgcaggca

SEQ ID NO: 56615 - DNA, 20 bp, synthetic construct
  misc_feature 1..20: note = chemically synthesized
  source 1..20: mol_type = other DNA
cttggggactgcaggcaagg

SEQ ID NO: 56616 - DNA, 20 bp, synthetic construct
  misc_feature 1..20: note = chemically synthesized
  source 1..20: mol_type = other DNA
ggggactgcaggcaaggcgg

SEQ ID NO: 56617 - DNA, 20 bp, synthetic construct
  misc_feature 1..20: note = chemically synthesized
  source 1..20: mol_type = other DNA
gggactgcaggcaaggcggc

SEQ ID NO: 56618 - DNA, 20 bp, synthetic construct
  misc_feature 1..20: note = chemically synthesized
  source 1..20: mol_type = other DNA
ggactgcaggcaaggcggcg

SEQ ID NO: 56619 - DNA, 20 bp, synthetic construct
  misc_feature 1..20: note = chemically synthesized
  source 1..20: mol_type = other DNA
gactgcaggcaaggcggcgg

SEQ ID NO: 56620 - DNA, 20 bp, synthetic construct
  misc_feature 1..20: note = chemically synthesized
  source 1..20: mol_type = other DNA
ctgcaggcaaggcggcgggg

SEQ ID NO: 56621 - DNA, 20 bp, synthetic construct
  misc_feature 1..20: note = chemically synthesized
  source 1..20: mol_type = other DNA
tgcaggcaaggcggcggggg

SEQ ID NO: 56622 - DNA, 20 bp, synthetic construct
  misc_feature 1..20: note = chemically synthesized
  source 1..20: mol_type = other DNA
ggcaaggcggcgggggagga

SEQ ID NO: 56623 - DNA, 20 bp, synthetic construct
  misc_feature 1..20: note = chemically synthesized
  source 1..20: mol_type = other DNA
gcaaggcggcgggggaggac

SEQ ID NO: 56624 - DNA, 20 bp, synthetic construct
  misc_feature 1..20: note = chemically synthesized
  source 1..20: mol_type = other DNA
aggcggcgggggaggacggg

SEQ ID NO: 56625 - DNA, 20 bp, synthetic construct
  misc_feature 1..20: note = chemically synthesized
  source 1..20: mol_type = other DNA
cggcgggggaggacgggtag

SEQ ID NO: 56626 - DNA, 20 bp, synthetic construct
  misc_feature 1..20: note = chemically synthesized
  source 1..20: mol_type = other DNA
ggcgggggaggacgggtagt

SEQ ID NO: 56627 - DNA, 20 bp, synthetic construct
  misc_feature 1..20: note = chemically synthesized
  source 1..20: mol_type = other DNA
gcgggggaggacgggtagtg

SEQ ID NO: 56628 - DNA, 20 bp, synthetic construct
  misc_feature 1..20: note = chemically synthesized
  source 1..20: mol_type = other DNA
gggggaggacgggtagtggg

SEQ ID NO: 56629 - DNA, 20 bp, synthetic construct
  misc_feature 1..20: note = chemically synthesized
  source 1..20: mol_type = other DNA
aggacgggtagtggggagca

SEQ ID NO: 56630 - DNA, 20 bp, synthetic construct
  misc_feature 1..20: note = chemically synthesized
  source 1..20: mol_type = other DNA
acgggtagtggggagcacgg

SEQ ID NO: 56631 - DNA, 20 bp, synthetic construct
  misc_feature 1..20: note = chemically synthesized
  source 1..20: mol_type = other DNA
gggtagtggggagcacggtg

SEQ ID NO: 56632 - DNA, 20 bp, synthetic construct
  misc_feature 1..20: note = chemically synthesized
  source 1..20: mol_type = other DNA
gtagtggggagcacggtgga

SEQ ID NO: 56633 - DNA, 20 bp, synthetic construct
  misc_feature 1..20: note = chemically synthesized
  source 1..20: mol_type = other DNA
gtggggagcacggtggagag

SEQ ID NO: 56634 - DNA, 20 bp, synthetic construct
  misc_feature 1..20: note = chemically synthesized
  source 1..20: mol_type = other DNA
tggggagcacggtggagagc

SEQ ID NO: 56635 - DNA, 20 bp, synthetic construct
  misc_feature 1..20: note = chemically synthesized
  source 1..20: mol_type = other DNA
ggggagcacggtggagagcg

SEQ ID NO: 56636 - DNA, 20 bp, synthetic construct
  misc_feature 1..20: note = chemically synthesized
  source 1..20: mol_type = other DNA
agcacggtggagagcgggga

SEQ ID NO: 56637 - DNA, 20 bp, synthetic construct
  misc_feature 1..20: note = chemically synthesized
  source 1..20: mol_type = other DNA
cggtggagagcggggacggc

SEQ ID NO: 56638 - DNA, 20 bp, synthetic construct
  misc_feature 1..20: note = chemically synthesized
  source 1..20: mol_type = other DNA
agcggggacggccggctctt

SEQ ID NO: 56639 - DNA, 20 bp, synthetic construct
  misc_feature 1..20: note = chemically synthesized
  source 1..20: mol_type = other DNA
gcggggacggccggctcttt

SEQ ID NO: 56640 - DNA, 20 bp, synthetic construct
  misc_feature 1..20: note = chemically synthesized
  source 1..20: mol_type = other DNA
cggggacggccggctctttg

SEQ ID NO: 56641 - DNA, 20 bp, synthetic construct
  misc_feature 1..20: note = chemically synthesized
  source 1..20: mol_type = other DNA
ccggctctttggggacttgc

SEQ ID NO: 56642 - DNA, 20 bp, synthetic construct
  misc_feature 1..20: note = chemically synthesized
  source 1..20: mol_type = other DNA
cggctctttggggacttgct

SEQ ID NO: 56643 - DNA, 20 bp, synthetic construct
  misc_feature 1..20: note = chemically synthesized
  source 1..20: mol_type = other DNA
ggctctttggggacttgctg

SEQ ID NO: 56644 - DNA, 20 bp, synthetic construct
  misc_feature 1..20: note = chemically synthesized
  source 1..20: mol_type = other DNA
tggggacttgctggggcgtg

SEQ ID NO: 56645 - DNA, 20 bp, synthetic construct
  misc_feature 1..20: note = chemically synthesized
  source 1..20: mol_type = other DNA
gggcgtgcggctgcgctatt

SEQ ID NO: 56646 - DNA, 20 bp, synthetic construct
  misc_feature 1..20: note = chemically synthesized
  source 1..20: mol_type = other DNA
cgtgcggctgcgctattcag

SEQ ID NO: 56647 - DNA, 20 bp, synthetic construct
  misc_feature 1..20: note = chemically synthesized
  source 1..20: mol_type = other DNA
gtgcggctgcgctattcagt

SEQ ID NO: 56648 - DNA, 20 bp, synthetic construct
  misc_feature 1..20: note = chemically synthesized
  source 1..20: mol_type = other DNA
cggctgcgctattcagtggg

SEQ ID NO: 56649 - DNA, 20 bp, synthetic construct
  misc_feature 1..20: note = chemically synthesized
  source 1..20: mol_type = other DNA
ggctgcgctattcagtggga

SEQ ID NO: 56650 - DNA, 20 bp, synthetic construct
  misc_feature 1..20: note = chemically synthesized
  source 1..20: mol_type = other DNA
ctattcagtgggaaggttcg

SEQ ID NO: 56651 - DNA, 20 bp, synthetic construct
  misc_feature 1..20: note = chemically synthesized
  source 1..20: mol_type = other DNA
tattcagtgggaaggttcgc

SEQ ID NO: 56652 - DNA, 20 bp, synthetic construct
  misc_feature 1..20: note = chemically synthesized
  source 1..20: mol_type = other DNA
attcagtgggaaggttcgcg

SEQ ID NO: 56653 - DNA, 20 bp, synthetic construct
  misc_feature 1..20: note = chemically synthesized
  source 1..20: mol_type = other DNA
agtgggaaggttcgcggggt

SEQ ID NO: 56654 - DNA, 20 bp, synthetic construct
  misc_feature 1..20: note = chemically synthesized
  source 1..20: mol_type = other DNA
gtgggaaggttcgcggggtt

SEQ ID NO: 56655 - DNA, 20 bp, synthetic construct
  misc_feature 1..20: note = chemically synthesized
  source 1..20: mol_type = other DNA
gggaaggttcgcggggttgg

SEQ ID NO: 56656 - DNA, 20 bp, synthetic construct
  misc_feature 1..20: note = chemically synthesized
  source 1..20: mol_type = other DNA
gttcgcggggttgggagacc

SEQ ID NO: 56657 - DNA, 20 bp, synthetic construct
  misc_feature 1..20: note = chemically synthesized
  source 1..20: mol_type = other DNA
tcgcggggttgggagacccg

SEQ ID NO: 56658 - DNA, 20 bp, synthetic construct
  misc_feature 1..20: note = chemically synthesized
  source 1..20: mol_type = other DNA
cgcggggttgggagacccgg

SEQ ID NO: 56659 - DNA, 20 bp, synthetic construct
  misc_feature 1..20: note = chemically synthesized
  source 1..20: mol_type = other DNA
ggttgggagacccggaggcc

SEQ ID NO: 56660 - DNA, 20 bp, synthetic construct
  misc_feature 1..20: note = chemically synthesized
  source 1..20: mol_type = other DNA
gttgggagacccggaggccg

SEQ ID NO: 56661 - DNA, 20 bp, synthetic construct
  misc_feature 1..20: note = chemically synthesized
  source 1..20: mol_type = other DNA
gggagacccggaggccgagg

SEQ ID NO: 56662 - DNA, 20 bp, synthetic construct
  misc_feature 1..20: note = chemically synthesized
  source 1..20: mol_type = other DNA
ggagacccggaggccgagga

SEQ ID NO: 56663 - DNA, 20 bp, synthetic construct
  misc_feature 1..20: note = chemically synthesized
  source 1..20: mol_type = other DNA
gagacccggaggccgaggaa

SEQ ID NO: 56664 - DNA, 20 bp, synthetic construct
  misc_feature 1..20: note = chemically synthesized
  source 1..20: mol_type = other DNA
cccggaggccgaggaagggc

SEQ ID NO: 56665 - DNA, 20 bp, synthetic construct
  misc_feature 1..20: note = chemically synthesized
  source 1..20: mol_type = other DNA
ggaggccgaggaagggcgag

SEQ ID NO: 56666 - DNA, 20 bp, synthetic construct
  misc_feature 1..20: note = chemically synthesized
  source 1..20: mol_type = other DNA
aggccgaggaagggcgagca

SEQ ID NO: 56667 - DNA, 20 bp, synthetic construct
  misc_feature 1..20: note = chemically synthesized
  source 1..20: mol_type = other DNA
aagggcgagcagagcactgc

SEQ ID NO: 56668 - DNA, 20 bp, synthetic construct
  misc_feature 1..20: note = chemically synthesized
  source 1..20: mol_type = other DNA
agggcgagcagagcactgcc

SEQ ID NO: 56669 - DNA, 20 bp, synthetic construct
  misc_feature 1..20: note = chemically synthesized
  source 1..20: mol_type = other DNA
cactgccaggatatcctgcc

SEQ ID NO: 56670 - DNA, 20 bp, synthetic construct
  misc_feature 1..20: note = chemically synthesized
  source 1..20: mol_type = other DNA
gatatcctgcccagatttcc

SEQ ID NO: 56671 - DNA, 20 bp, synthetic construct
  misc_feature 1..20: note = chemically synthesized
  source 1..20: mol_type = other DNA
tcccagtttctgcctcgccg

SEQ ID NO: 56672 - DNA, 20 bp, synthetic construct
  misc_feature 1..20: note = chemically synthesized
  source 1..20: mol_type = other DNA
gtttctgcctcgccgcggca

SEQ ID NO: 56673 - DNA, 20 bp, synthetic construct
  misc_feature 1..20: note = chemically synthesized
  source 1..20: mol_type = other DNA
tttctgcctcgccgcggcac

SEQ ID NO: 56674 - DNA, 20 bp, synthetic construct
  misc_feature 1..20: note = chemically synthesized
  source 1..20: mol_type = other DNA
ctgcctcgccgcggcacagg

SEQ ID NO: 56675 - DNA, 20 bp, synthetic construct
  misc_feature 1..20: note = chemically synthesized
  source 1..20: mol_type = other DNA
tgcctcgccgcggcacaggt

SEQ ID NO: 56676 - DNA, 20 bp, synthetic construct
  misc_feature 1..20: note = chemically synthesized
  source 1..20: mol_type = other DNA
cgccgcggcacaggtgggtg

SEQ ID NO: 56677 - DNA, 20 bp, synthetic construct
  misc_feature 1..20: note = chemically synthesized
  source 1..20: mol_type = other DNA
gccgcggcacaggtgggtga

SEQ ID NO: 56678 - DNA, 20 bp, synthetic construct
  misc_feature 1..20: note = chemically synthesized
  source 1..20: mol_type = other DNA
cgcggcacaggtgggtgaag

SEQ ID NO: 56679 - DNA, 20 bp, synthetic construct
  misc_feature 1..20: note = chemically synthesized
  source 1..20: mol_type = other DNA
tgggtgaaggagtgaatgcc

SEQ ID NO: 56680 - DNA, 20 bp, synthetic construct
  misc_feature 1..20: note = chemically synthesized
  source 1..20: mol_type = other DNA
agtgaatgcctggaacgtac

SEQ ID NO: 56681 - DNA, 20 bp, synthetic construct
  misc_feature 1..20: note = chemically synthesized
  source 1..20: mol_type = other DNA
gtgaatgcctggaacgtact

SEQ ID NO: 56682 - DNA, 20 bp, synthetic construct
  misc_feature 1..20: note = chemically synthesized
  source 1..20: mol_type = other DNA
gaacgtactgggaactgcac

SEQ ID NO: 56683 - DNA, 20 bp, synthetic construct
  misc_feature 1..20: note = chemically synthesized
  source 1..20: mol_type = other DNA
aacgtactgggaactgcacc

SEQ ID NO: 56684 - DNA, 20 bp, synthetic construct
  misc_feature 1..20: note = chemically synthesized
  source 1..20: mol_type = other DNA
actgggaactgcaccaggca

SEQ ID NO: 56685 - DNA, 20 bp, synthetic construct
  misc_feature 1..20: note = chemically synthesized
  source 1..20: mol_type = other DNA
tgggaactgcaccaggcaca

SEQ ID NO: 56686 - DNA, 20 bp, synthetic construct
  misc_feature 1..20: note = chemically synthesized
  source 1..20: mol_type = other DNA
aactgcaccaggcacagaga

SEQ ID NO: 56687 - DNA, 20 bp, synthetic construct
  misc_feature 1..20: note = chemically synthesized
  source 1..20: mol_type = other DNA
tgcaccaggcacagagaaag

SEQ ID NO: 56688 - DNA, 20 bp, synthetic construct
  misc_feature 1..20: note = chemically synthesized
  source 1..20: mol_type = other DNA
gcaccaggcacagagaaagc

SEQ ID NO: 56689 - DNA, 20 bp, synthetic construct
  misc_feature 1..20: note = chemically synthesized
  source 1..20: mol_type = other DNA
agaaagcgggcttgccatta

SEQ ID NO: 56690 - DNA, 20 bp, synthetic construct
  misc_feature 1..20: note = chemically synthesized
  source 1..20: mol_type = other DNA
aagcgggcttgccattatag

SEQ ID NO: 56691 - DNA, 20 bp, synthetic construct
  misc_feature 1..20: note = chemically synthesized
  source 1..20: mol_type = other DNA
agcgggcttgccattatagt

SEQ ID NO: 56692 - DNA, 20 bp, synthetic construct
  misc_feature 1..20: note = chemically synthesized
  source 1..20: mol_type = other DNA
cattatagtgggttccgatt

SEQ ID NO: 56693 - DNA, 20 bp, synthetic construct
  misc_feature 1..20: note = chemically synthesized
  source 1..20: mol_type = other DNA
tagtgggttccgatttggtt

SEQ ID NO: 56694 - DNA, 20 bp, synthetic construct
  misc_feature 1..20: note = chemically synthesized
  source 1..20: mol_type = other DNA
ccgatttggtttggaaaaca

SEQ ID NO: 56695 - DNA, 20 bp, synthetic construct
  misc_feature 1..20: note = chemically synthesized
  source 1..20: mol_type = other DNA
cgatttggtttggaaaacat

SEQ ID NO: 56696 - DNA, 20 bp, synthetic construct
  misc_feature 1..20: note = chemically synthesized
  source 1..20: mol_type = other DNA
tttggtttggaaaacatggg

SEQ ID NO: 56697 - DNA, 20 bp, synthetic construct
  misc_feature 1..20: note = chemically synthesized
  source 1..20: mol_type = other DNA
ggtttggaaaacatgggcag

SEQ ID NO: 56698 - DNA, 20 bp, synthetic construct
  misc_feature 1..20: note = chemically synthesized
  source 1..20: mol_type = other DNA
tttggaaaacatgggcagcg

SEQ ID NO: 56699 - DNA, 20 bp, synthetic construct
  misc_feature 1..20: note = chemically synthesized
  source 1..20: mol_type = other DNA
ttggaaaacatgggcagcgg

SEQ ID NO: 56700 - DNA, 20 bp, synthetic construct
  misc_feature 1..20: note = chemically synthesized
  source 1..20: mol_type = other DNA
tggaaaacatgggcagcgga

SEQ ID NO: 56701 - DNA, 20 bp, synthetic construct
  misc_feature 1..20: note = chemically synthesized
  source 1..20: mol_type = other DNA
aaaacatgggcagcggaggg

SEQ ID NO: 56702 - DNA, 20 bp, synthetic construct
  misc_feature 1..20: note = chemically synthesized
  source 1..20: mol_type = other DNA
aacatgggcagcggagggtg

SEQ ID NO: 56703 - DNA, 20 bp, synthetic construct
  misc_feature 1..20: note = chemically synthesized
  source 1..20: mol_type = other DNA
acatgggcagcggagggtgg

SEQ ID NO: 56704 - DNA, 20 bp, synthetic construct
  misc_feature 1..20: note = chemically synthesized
  source 1..20: mol_type = other DNA
catgggcagcggagggtgga

SEQ ID NO: 56705 - DNA, 20 bp, synthetic construct
  misc_feature 1..20: note = chemically synthesized
  source 1..20: mol_type = other DNA
gcagcggagggtggagggcc

SEQ ID NO: 56706 - DNA, 20 bp, synthetic construct
  misc_feature 1..20: note = chemically synthesized
  source 1..20: mol_type = other DNA
agcggagggtggagggcctg

SEQ ID NO: 56707 - DNA, 20 bp, synthetic construct
  misc_feature 1..20: note = chemically synthesized
  source 1..20: mol_type = other DNA
cggagggtggagggcctgga

SEQ ID NO: 56708 - DNA, 20 bp, synthetic construct
  misc_feature 1..20: note = chemically synthesized
  source 1..20: mol_type = other DNA
agggtggagggcctggagag

SEQ ID NO: 56709 - DNA, 20 bp, synthetic construct
  misc_feature 1..20: note = chemically synthesized
  source 1..20: mol_type = other DNA
gggtggagggcctggagaga

SEQ ID NO: 56710 - DNA, 20 bp, synthetic construct
  misc_feature 1..20: note = chemically synthesized
  source 1..20: mol_type = other DNA
ctggagagaaggccctaccc

SEQ ID NO: 56711 - DNA, 20 bp, synthetic construct
  misc_feature 1..20: note = chemically synthesized
  source 1..20: mol_type = other DNA
agagaaggccctacccgaga

SEQ ID NO: 56712 - DNA, 20 bp, synthetic construct
  misc_feature 1..20: note = chemically synthesized
  source 1..20: mol_type = other DNA
gagaaggccctacccgagac

SEQ ID NO: 56713 - DNA, 20 bp, synthetic construct
  misc_feature 1..20: note = chemically synthesized
  source 1..20: mol_type = other DNA
agaaggccctacccgagaca

SEQ ID NO: 56714 - DNA, 20 bp, synthetic construct
  misc_feature 1..20: note = chemically synthesized
  source 1..20: mol_type = other DNA
gaaggccctacccgagacag

SEQ ID NO: 56715 - DNA, 20 bp, synthetic construct
  misc_feature 1..20: note = chemically synthesized
  source 1..20: mol_type = other DNA
ggccctacccgagacagggg

SEQ ID NO: 56716 - DNA, 20 bp, synthetic construct
  misc_feature 1..20: note = chemically synthesized
  source 1..20: mol_type = other DNA
gccctacccgagacaggggc

SEQ ID NO: 56717 - DNA, 20 bp, synthetic construct
  misc_feature 1..20: note = chemically synthesized
  source 1..20: mol_type = other DNA
ccctacccgagacaggggcg

SEQ ID NO: 56718 - DNA, 20 bp, synthetic construct
  misc_feature 1..20: note = chemically synthesized
  source 1..20: mol_type = other DNA
tacccgagacaggggcgggg

SEQ ID NO: 56719 - DNA, 20 bp, synthetic construct
  misc_feature 1..20: note = chemically synthesized
  source 1..20: mol_type = other DNA
acccgagacaggggcggggt

SEQ ID NO: 56720 - DNA, 20 bp, synthetic construct
  misc_feature 1..20: note = chemically synthesized
  source 1..20: mol_type = other DNA
cgagacaggggcggggtggg

SEQ ID NO: 56721 - DNA, 20 bp, synthetic construct
  misc_feature 1..20: note = chemically synthesized
  source 1..20: mol_type = other DNA
gagacaggggcggggtggga

SEQ ID NO: 56722 - DNA, 20 bp, synthetic construct
  misc_feature 1..20: note = chemically synthesized
  source 1..20: mol_type = other DNA
caggggcggggtgggaagga

SEQ ID NO: 56723 - DNA, 20 bp, synthetic construct
  misc_feature 1..20: note = chemically synthesized
  source 1..20: mol_type = other DNA
gggcggggtgggaaggacgg

SEQ ID NO: 56724 - DNA, 20 bp, synthetic construct
  misc_feature 1..20: note = chemically synthesized
  source 1..20: mol_type = other DNA
gtgggaaggacggcagatgc

SEQ ID NO: 56725 - DNA, 20 bp, synthetic construct
  misc_feature 1..20: note = chemically synthesized
  source 1..20: mol_type = other DNA
tgggaaggacggcagatgct

SEQ ID NO: 56726 - DNA, 20 bp, synthetic construct
  misc_feature 1..20: note = chemically synthesized
  source 1..20: mol_type = other DNA
ggaaggacggcagatgctgg

SEQ ID NO: 56727 - DNA, 20 bp, synthetic construct
  misc_feature 1..20: note = chemically synthesized
  source 1..20: mol_type = other DNA
acggcagatgctgggagcac

SEQ ID NO: 56728 - DNA, 20 bp, synthetic construct
  misc_feature 1..20: note = chemically synthesized
  source 1..20: mol_type = other DNA
cggcagatgctgggagcacg

SEQ ID NO: 56729 - DNA, 20 bp, synthetic construct
  misc_feature 1..20: note = chemically synthesized
  source 1..20: mol_type = other DNA
gaggcaatttctttatgaca

SEQ ID NO: 56730 - DNA, 20 bp, synthetic construct
  misc_feature 1..20: note = chemically synthesized
  source 1..20: mol_type = other DNA
atgacacagaactcatgctc

SEQ ID NO: 56731 - DNA, 20 bp, synthetic construct
  misc_feature 1..20: note = chemically synthesized
  source 1..20: mol_type = other DNA
ctctagtattccatctgttt

SEQ ID NO: 56732 - DNA, 20 bp, synthetic construct
  misc_feature 1..20: note = chemically synthesized
  source 1..20: mol_type = other DNA
tattccatctgtttcagccg

SEQ ID NO: 56733 - DNA, 20 bp, synthetic construct
  misc_feature 1..20: note = chemically synthesized
  source 1..20: mol_type = other DNA
catctgtttcagccgaagaa

SEQ ID NO: 56734 - DNA, 20 bp, synthetic construct
  misc_feature 1..20: note = chemically synthesized
  source 1..20: mol_type = other DNA
tttcagccgaagaaaagaac

SEQ ID NO: 56735 - DNA, 20 bp, synthetic construct
  misc_feature 1..20: note = chemically synthesized
  source 1..20: mol_type = other DNA
ccgaagaaaagaaccagctg

SEQ ID NO: 56736 - DNA, 20 bp, synthetic construct
  misc_feature 1..20: note = chemically synthesized
  source 1..20: mol_type = other DNA
cgaagaaaagaaccagctga

SEQ ID NO: 56737 - DNA, 20 bp, synthetic construct
  misc_feature 1..20: note = chemically synthesized
  source 1..20: mol_type = other DNA
gaagaaaagaaccagctgaa

SEQ ID NO: 56738 - DNA, 20 bp, synthetic construct
  misc_feature 1..20: note = chemically synthesized
  source 1..20: mol_type = other DNA
aagaaaagaaccagctgaag

SEQ ID NO: 56739 - DNA, 20 bp, synthetic construct
  misc_feature 1..20: note = chemically synthesized
  source 1..20: mol_type = other DNA
aaaagaaccagctgaagggg

SEQ ID NO: 56740 - DNA, 20 bp, synthetic construct
  misc_feature 1..20: note = chemically synthesized
  source 1..20: mol_type = other DNA
aaagaaccagctgaaggggc

SEQ ID NO: 56741 - DNA, 20 bp, synthetic construct
  misc_feature 1..20: note = chemically synthesized
  source 1..20: mol_type = other DNA
aagaaccagctgaaggggca

SEQ ID NO: 56742 - DNA, 20 bp, synthetic construct
  misc_feature 1..20: note = chemically synthesized
  source 1..20: mol_type = other DNA
agaaccagctgaaggggcag

SEQ ID NO: 56743 - DNA, 20 bp, synthetic construct
  misc_feature 1..20: note = chemically synthesized
  source 1..20: mol_type = other DNA
aaccagctgaaggggcaggg

SEQ ID NO: 56744 - DNA, 20 bp, synthetic construct
  misc_feature 1..20: note = chemically synthesized
  source 1..20: mol_type = other DNA
cagctgaaggggcaggggag

SEQ ID NO: 56745 - DNA, 20 bp, synthetic construct
  misc_feature 1..20: note = chemically synthesized
  source 1..20: mol_type = other DNA
agctgaaggggcaggggaga

SEQ ID NO: 56746 - DNA, 20 bp, synthetic construct
  misc_feature 1..20: note = chemically synthesized
  source 1..20: mol_type = other DNA
gctgaaggggcaggggagaa

SEQ ID NO: 56747 - DNA, 20 bp, synthetic construct
  misc_feature 1..20: note = chemically synthesized
  source 1..20: mol_type = other DNA
ctgaaggggcaggggagaag

SEQ ID NO: 56748 - DNA, 20 bp, synthetic construct
  misc_feature 1..20: note = chemically synthesized
  source 1..20: mol_type = other DNA
aaggggcaggggagaagggg

SEQ ID NO: 56749 - DNA, 20 bp, synthetic construct
  misc_feature 1..20: note = chemically synthesized
  source 1..20: mol_type = other DNA
ggggcaggggagaaggggcg

SEQ ID NO: 56750 - DNA, 20 bp, synthetic construct
  misc_feature 1..20: note = chemically synthesized
  source 1..20: mol_type = other DNA
gggcaggggagaaggggcgg

SEQ ID NO: 56751 - DNA, 20 bp, synthetic construct
  misc_feature 1..20: note = chemically synthesized
  source 1..20: mol_type = other DNA
gaaggggcggaggtattctc

SEQ ID NO: 56752 - DNA, 20 bp, synthetic construct
  misc_feature 1..20: note = chemically synthesized
  source 1..20: mol_type = other DNA
aaggggcggaggtattctcg

SEQ ID NO: 56753 - DNA, 20 bp, synthetic construct
  misc_feature 1..20: note = chemically synthesized
  source 1..20: mol_type = other DNA
gaggtattctcgaggcccat

SEQ ID NO: 56754 - DNA, 20 bp, synthetic construct
  misc_feature 1..20: note = chemically synthesized
  source 1..20: mol_type = other DNA
cgaggcccattggcgtcctt

SEQ ID NO: 56755 - DNA, 20 bp, synthetic construct
  misc_feature 1..20: note = chemically synthesized
  source 1..20: mol_type = other DNA
gaggcccattggcgtccttt

SEQ ID NO: 56756 - DNA, 20 bp, synthetic construct
  misc_feature 1..20: note = chemically synthesized
  source 1..20: mol_type = other DNA
cattggcgtcctttaggact

SEQ ID NO: 56757 - DNA, 20 bp, synthetic construct
  misc_feature 1..20: note = chemically synthesized
  source 1..20: mol_type = other DNA
attggcgtcctttaggactc

SEQ ID NO: 56758 - DNA, 20 bp, synthetic construct
  misc_feature 1..20: note = chemically synthesized
  source 1..20: mol_type = other DNA
ggcgtcctttaggactcagg

SEQ ID NO: 56759 - DNA, 20 bp, synthetic construct
  misc_feature 1..20: note = chemically synthesized
  source 1..20: mol_type = other DNA
gcgtcctttaggactcaggc

SEQ ID NO: 56760 - DNA, 20 bp, synthetic construct
  misc_feature 1..20: note = chemically synthesized
  source 1..20: mol_type = other DNA
cgtcctttaggactcaggca

SEQ ID NO: 56761 - DNA, 20 bp, synthetic construct
  misc_feature 1..20: note = chemically synthesized
  source 1..20: mol_type = other DNA
cctttaggactcaggcaggg

SEQ ID NO: 56762 - DNA, 20 bp, synthetic construct
  misc_feature 1..20: note = chemically synthesized
  source 1..20: mol_type = other DNA
ctttaggactcaggcaggga

SEQ ID NO: 56763 - DNA, 20 bp, synthetic construct
  misc_feature 1..20: note = chemically synthesized
  source 1..20: mol_type = other DNA
tttaggactcaggcagggaa

SEQ ID NO: 56764 - DNA, 20 bp, synthetic construct
  misc_feature 1..20: note = chemically synthesized
  source 1..20: mol_type = other DNA
ctcaggcagggaagggccct

SEQ ID NO: 56765 - DNA, 20 bp, synthetic construct
  misc_feature 1..20: note = chemically synthesized
  source 1..20: mol_type = other DNA
gggaagggcccttggtgctc

SEQ ID NO: 56766 - DNA, 20 bp, synthetic construct
  misc_feature 1..20: note = chemically synthesized
  source 1..20: mol_type = other DNA
gaagggcccttggtgctctg

SEQ ID NO: 56767 - DNA, 20 bp, synthetic construct
  misc_feature 1..20: note = chemically synthesized
  source 1..20: mol_type = other DNA
ggcccttggtgctctggagc

SEQ ID NO: 56768 - DNA, 20 bp, synthetic construct
  misc_feature 1..20: note = chemically synthesized
  source 1..20: mol_type = other DNA
cccttggtgctctggagccg

SEQ ID NO: 56769 - DNA, 20 bp, synthetic construct
  misc_feature 1..20: note = chemically synthesized
  source 1..20: mol_type = other DNA
ccttggtgctctggagccgg

SEQ ID NO: 56770 - DNA, 20 bp, synthetic construct
  misc_feature 1..20: note = chemically synthesized
  source 1..20: mol_type = other DNA
tggtgctctggagccggagg

SEQ ID NO: 56771 - DNA, 20 bp, synthetic construct
  misc_feature 1..20: note = chemically synthesized
  source 1..20: mol_type = other DNA
ggagccggaggtggtgcgcc

SEQ ID NO: 56772 - DNA, 20 bp, synthetic construct
  misc_feature 1..20: note = chemically synthesized
  source 1..20: mol_type = other DNA
ggaggtggtgcgcctggtac

SEQ ID NO: 56773 - DNA, 20 bp, synthetic construct
  misc_feature 1..20: note = chemically synthesized
  source 1..20: mol_type = other DNA
gaggtggtgcgcctggtact

SEQ ID NO: 56774 - DNA, 20 bp, synthetic construct
  misc_feature 1..20: note = chemically synthesized
  source 1..20: mol_type = other DNA
tgcgcctggtactgggaccc

SEQ ID NO: 56775 - DNA, 20 bp, synthetic construct
  misc_feature 1..20: note = chemically synthesized
  source 1..20: mol_type = other DNA
cgcctggtactgggaccccg

SEQ ID NO: 56776 - DNA, 20 bp, synthetic construct
  misc_feature 1..20: note = chemically synthesized
  source 1..20: mol_type = other DNA
ggtactgggaccccggagct

SEQ ID NO: 56777 - DNA, 20 bp, synthetic construct
  misc_feature 1..20: note = chemically synthesized
  source 1..20: mol_type = other DNA
tgggaccccggagctgagcc

SEQ ID NO: 56778 - DNA, 20 bp, synthetic construct
  misc_feature 1..20: note = chemically synthesized
  source 1..20: mol_type = other DNA
cggagctgagcccggcgcct

SEQ ID NO: 56779 - DNA, 20 bp, synthetic construct
  misc_feature 1..20: note = chemically synthesized
  source 1..20: mol_type = other DNA
gcccggcgcctcagcccacc

SEQ ID NO: 56780 - DNA, 20 bp, synthetic construct
  misc_feature 1..20: note = chemically synthesized
  source 1..20: mol_type = other DNA
ggctgtctgccgaccgtgtg

SEQ ID NO: 56781 - DNA, 20 bp, synthetic construct
  misc_feature 1..20: note = chemically synthesized
  source 1..20: mol_type = other DNA
gctgtctgccgaccgtgtgc

SEQ ID NO: 56782 - DNA, 20 bp, synthetic construct
  misc_feature 1..20: note = chemically synthesized
  source 1..20: mol_type = other DNA
ctgtctgccgaccgtgtgcg

SEQ ID NO: 56783 - DNA, 20 bp, synthetic construct
  misc_feature 1..20: note = chemically synthesized
  source 1..20: mol_type = other DNA
ctgccgaccgtgtgcggggc

SEQ ID NO: 56784 - DNA, 20 bp, synthetic construct
  misc_feature 1..20: note = chemically synthesized
  source 1..20: mol_type = other DNA
agtttgctcaacaactctgc

SEQ ID NO: 56785 - DNA, 20 bp, synthetic construct
  misc_feature 1..20: note = chemically synthesized
  source 1..20: mol_type = other DNA
tcaacaactctgccagcttc

SEQ ID NO: 56786 - DNA, 20 bp, synthetic construct
  misc_feature 1..20: note = chemically synthesized
  source 1..20: mol_type = other DNA
ctctgccagcttctggccct

SEQ ID NO: 56787 - DNA, 20 bp, synthetic construct
  misc_feature 1..20: note = chemically synthesized
  source 1..20: mol_type = other DNA
tctgccagcttctggccctc

SEQ ID NO: 56788 - DNA, 20 bp, synthetic construct
  misc_feature 1..20: note = chemically synthesized
  source 1..20: mol_type = other DNA
agcttctggccctcaggctg

SEQ ID NO: 56789 - DNA, 20 bp, synthetic construct
  misc_feature 1..20: note = chemically synthesized
  source 1..20: mol_type = other DNA
gcttctggccctcaggctgt

SEQ ID NO: 56790 - DNA, 20 bp, synthetic construct
  misc_feature 1..20: note = chemically synthesized
  source 1..20: mol_type = other DNA
tctggccctcaggctgtggg

SEQ ID NO: 56791 - DNA, 20 bp, synthetic construct
  misc_feature 1..20: note = chemically synthesized
  source 1..20: mol_type = other DNA
ggctgtgggaagcttcttcc

SEQ ID NO: 56792 - DNA, 20 bp, synthetic construct
  misc_feature 1..20: note = chemically synthesized
  source 1..20: mol_type = other DNA
gctgtgggaagcttcttccc

SEQ ID NO: 56793 - DNA, 20 bp, synthetic construct
  misc_feature 1..20: note = chemically synthesized
  source 1..20: mol_type = other DNA
ctgtgggaagcttcttcccg

SEQ ID NO: 56794 - DNA, 20 bp, synthetic construct
  misc_feature 1..20: note = chemically synthesized
  source 1..20: mol_type = other DNA
gggaagcttcttcccggggc

SEQ ID NO: 56795 - DNA, 20 bp, synthetic construct
  misc_feature 1..20: note = chemically synthesized
  source 1..20: mol_type = other DNA
tcttcccggggcgagaccac

SEQ ID NO: 56796 - DNA, 20 bp, synthetic construct
  misc_feature 1..20: note = chemically synthesized
  source 1..20: mol_type = other DNA
cgagaccactagctttttct

SEQ ID NO: 56797 - DNA, 20 bp, synthetic construct
  misc_feature 1..20: note = chemically synthesized
  source 1..20: mol_type = other DNA
tagctttttctaagtattac

SEQ ID NO: 56798 - DNA, 20 bp, synthetic construct
  misc_feature 1..20: note = chemically synthesized
  source 1..20: mol_type = other DNA
ttttctaagtattaccagcc

SEQ ID NO: 56799 - DNA, 20 bp, synthetic construct
  misc_feature 1..20: note = chemically synthesized
  source 1..20: mol_type = other DNA
tttctaagtattaccagccc

SEQ ID NO: 56800 - DNA, 20 bp, synthetic construct
  misc_feature 1..20: note = chemically synthesized
  source 1..20: mol_type = other DNA
agtattaccagcccaggact

SEQ ID NO: 56801 - DNA, 20 bp, synthetic construct
  misc_feature 1..20: note = chemically synthesized
  source 1..20: mol_type = other DNA
taccagcccaggacttggct

SEQ ID NO: 56802 - DNA, 20 bp, synthetic construct
  misc_feature 1..20: note = chemically synthesized
  source 1..20: mol_type = other DNA
accagcccaggacttggctg

SEQ ID NO: 56803 - DNA, 20 bp, synthetic construct
  misc_feature 1..20: note = chemically synthesized
  source 1..20: mol_type = other DNA
ggctgaggttctgtgtcccc

SEQ ID NO: 56804 - DNA, 20 bp, synthetic construct
  misc_feature 1..20: note = chemically synthesized
  source 1..20: mol_type = other DNA
aggttctgtgtcccccagct

SEQ ID NO: 56805 - DNA, 20 bp, synthetic construct
  misc_feature 1..20: note = chemically synthesized
  source 1..20: mol_type = other DNA
gttctgtgtcccccagcttg

SEQ ID NO: 56806 - DNA, 20 bp, synthetic construct
  misc_feature 1..20: note = chemically synthesized
  source 1..20: mol_type = other DNA
tgtgtcccccagcttggagt

SEQ ID NO: 56807 - DNA, 20 bp, synthetic construct
  misc_feature 1..20: note = chemically synthesized
  source 1..20: mol_type = other DNA
ccccagcttggagtcagatg

SEQ ID NO: 56808 - DNA, 20 bp, synthetic construct
  misc_feature 1..20: note = chemically synthesized
  source 1..20: mol_type = other DNA
cccagcttggagtcagatgt

SEQ ID NO: 56809 - DNA, 20 bp, synthetic construct
  misc_feature 1..20: note = chemically synthesized
  source 1..20: mol_type = other DNA
ccagcttggagtcagatgtg

SEQ ID NO: 56810 - DNA, 20 bp, synthetic construct
  misc_feature 1..20: note = chemically synthesized
  source 1..20: mol_type = other DNA
tcagatgtggggttgaatct

SEQ ID NO: 56811 - DNA, 20 bp, synthetic construct
  misc_feature 1..20: note = chemically synthesized
  source 1..20: mol_type = other DNA
gaatcttggcttcctctcac

SEQ ID NO: 56812 - DNA, 20 bp, synthetic construct
  misc_feature 1..20: note = chemically synthesized
  source 1..20: mol_type = other DNA
tggcttcctctcactagctg

SEQ ID NO: 56813 - DNA, 20 bp, synthetic construct
  misc_feature 1..20: note = chemically synthesized
  source 1..20: mol_type = other DNA
cactagctgtggtgcttgac

SEQ ID NO: 56814 - DNA, 20 bp, synthetic construct
  misc_feature 1..20: note = chemically synthesized
  source 1..20: mol_type = other DNA
ttgacaagtcacttatcctt

SEQ ID NO: 56815 - DNA, 20 bp, synthetic construct
  misc_feature 1..20: note = chemically synthesized
  source 1..20: mol_type = other DNA
ctccattgcctaatctttaa

SEQ ID NO: 56816 - DNA, 20 bp, synthetic construct
  misc_feature 1..20: note = chemically synthesized
  source 1..20: mol_type = other DNA
tccattgcctaatctttaaa

SEQ ID NO: 56817 - DNA, 20 bp, synthetic construct
  misc_feature 1..20: note = chemically synthesized
  source 1..20: mol_type = other DNA
ccattgcctaatctttaaaa

SEQ ID NO: 56818 - DNA, 20 bp, synthetic construct
  misc_feature 1..20: note = chemically synthesized
  source 1..20: mol_type = other DNA
attgcctaatctttaaaagg

SEQ ID NO: 56819 - DNA, 20 bp, synthetic construct
  misc_feature 1..20: note = chemically synthesized
  source 1..20: mol_type = other DNA
ttgcctaatctttaaaaggg

SEQ ID NO: 56820 - DNA, 20 bp, synthetic construct
  misc_feature 1..20: note = chemically synthesized
  source 1..20: mol_type = other DNA
ggaggtgacaatcgtcccta

SEQ ID NO: 56821 - DNA, 20 bp, synthetic construct
  misc_feature 1..20: note = chemically synthesized
  source 1..20: mol_type = other DNA
tgacaatcgtccctacggct

SEQ ID NO: 56822 - DNA, 20 bp, synthetic construct
  misc_feature 1..20: note = chemically synthesized
  source 1..20: mol_type = other DNA
caatcgtccctacggctcag

SEQ ID NO: 56823 - DNA, 20 bp, synthetic construct
  misc_feature 1..20: note = chemically synthesized
  source 1..20: mol_type = other DNA
tcgtccctacggctcagtgg

SEQ ID NO: 56824 - DNA, 20 bp, synthetic construct
  misc_feature 1..20: note = chemically synthesized
  source 1..20: mol_type = other DNA
tccctacggctcagtggcag

SEQ ID NO: 56825 - DNA, 20 bp, synthetic construct
  misc_feature 1..20: note = chemically synthesized
  source 1..20: mol_type = other DNA
tacggctcagtggcagcaga

SEQ ID NO: 56826 - DNA, 20 bp, synthetic construct
  misc_feature 1..20: note = chemically synthesized
  source 1..20: mol_type = other DNA
acggctcagtggcagcagat

SEQ ID NO: 56827 - DNA, 20 bp, synthetic construct
  misc_feature 1..20: note = chemically synthesized
  source 1..20: mol_type = other DNA
cggctcagtggcagcagatg

SEQ ID NO: 56828 - DNA, 20 bp, synthetic construct
  misc_feature 1..20: note = chemically synthesized
  source 1..20: mol_type = other DNA
gctcagtggcagcagatggg

SEQ ID NO: 56829 - DNA, 20 bp, synthetic construct
  misc_feature 1..20: note = chemically synthesized
  source 1..20: mol_type = other DNA
tggcagcagatggggagatg

SEQ ID NO: 56830 - DNA, 20 bp, synthetic construct
  misc_feature 1..20: note = chemically synthesized
  source 1..20: mol_type = other DNA
ggcagcagatggggagatga

SEQ ID NO: 56831 - DNA, 20 bp, synthetic construct
  misc_feature 1..20: note = chemically synthesized
  source 1..20: mol_type = other DNA
gcagcagatggggagatgaa

SEQ ID NO: 56832 - DNA, 20 bp, synthetic construct
  misc_feature 1..20: note = chemically synthesized
  source 1..20: mol_type = other DNA
cagatggggagatgaaggga

SEQ ID NO: 56833 - DNA, 20 bp, synthetic construct
  misc_feature 1..20: note = chemically synthesized
  source 1..20: mol_type = other DNA
gggaaagttctgttgaccat

SEQ ID NO: 56834 - DNA, 20 bp, synthetic construct
  misc_feature 1..20: note = chemically synthesized
  source 1..20: mol_type = other DNA
catgagtgaacttacaatgc

SEQ ID NO: 56835 - DNA, 20 bp, synthetic construct
  misc_feature 1..20: note = chemically synthesized
  source 1..20: mol_type = other DNA
tgaacttacaatgcaagccc

SEQ ID NO: 56836 - DNA, 20 bp, synthetic construct
  misc_feature 1..20: note = chemically synthesized
  source 1..20: mol_type = other DNA
gaacttacaatgcaagcccc

SEQ ID NO: 56837 - DNA, 20 bp, synthetic construct
  misc_feature 1..20: note = chemically synthesized
  source 1..20: mol_type = other DNA
aacttacaatgcaagccccg

SEQ ID NO: 56838 - DNA, 20 bp, synthetic construct
  misc_feature 1..20: note = chemically synthesized
  source 1..20: mol_type = other DNA
acttacaatgcaagccccgg

SEQ ID NO: 56839 - DNA, 20 bp, synthetic construct
  misc_feature 1..20: note = chemically synthesized
  source 1..20: mol_type = other DNA
cttacaatgcaagccccggg

SEQ ID NO: 56840 - DNA, 20 bp, synthetic construct
  misc_feature 1..20: note = chemically synthesized
  source 1..20: mol_type = other DNA
agccccggggggatcacttg

SEQ ID NO: 56841 - DNA, 20 bp, synthetic construct
  misc_feature 1..20: note = chemically synthesized
  source 1..20: mol_type = other DNA
tgcagttttgtccctgtctg

SEQ ID NO: 56842 - DNA, 20 bp, synthetic construct
  misc_feature 1..20: note = chemically synthesized
  source 1..20: mol_type = other DNA
ctgtctgcagtgtgacctgt

SEQ ID NO: 56843 - DNA, 20 bp, synthetic construct
  misc_feature 1..20: note = chemically synthesized
  source 1..20: mol_type = other DNA
attgtctttgctccaaacca

SEQ ID NO: 56844 - DNA, 20 bp, synthetic construct
  misc_feature 1..20: note = chemically synthesized
  source 1..20: mol_type = other DNA
ttgctccaaaccacagctcc

SEQ ID NO: 56845 - DNA, 20 bp, synthetic construct
  misc_feature 1..20: note = chemically synthesized
  source 1..20: mol_type = other DNA
tgctccaaaccacagctcct

SEQ ID NO: 56846 - DNA, 20 bp, synthetic construct
  misc_feature 1..20: note = chemically synthesized
  source 1..20: mol_type = other DNA
gctccaaaccacagctcctg

SEQ ID NO: 56847 - DNA, 20 bp, synthetic construct
  misc_feature 1..20: note = chemically synthesized
  source 1..20: mol_type = other DNA
ccaaaccacagctcctgggg

SEQ ID NO: 56848 - DNA, 20 bp, synthetic construct
  misc_feature 1..20: note = chemically synthesized
  source 1..20: mol_type = other DNA
aaaccacagctcctggggca

SEQ ID NO: 56849 - DNA, 20 bp, synthetic construct
  misc_feature 1..20: note = chemically synthesized
  source 1..20: mol_type = other DNA
aaccacagctcctggggcag

SEQ ID NO: 56850 - DNA, 20 bp, synthetic construct
  misc_feature 1..20: note = chemically synthesized
  source 1..20: mol_type = other DNA
accacagctcctggggcaga

SEQ ID NO: 56851 - DNA, 20 bp, synthetic construct
  misc_feature 1..20: note = chemically synthesized
  source 1..20: mol_type = other DNA
ccacagctcctggggcagag

SEQ ID NO: 56852 - DNA, 20 bp, synthetic construct
  misc_feature 1..20: note = chemically synthesized
  source 1..20: mol_type = other DNA
ggggaaaattctgccactca

SEQ ID NO: 56853 - DNA, 20 bp, synthetic construct
  misc_feature 1..20: note = chemically synthesized
  source 1..20: mol_type = other DNA
gcctgcccacgcttctgtct

SEQ ID NO: 56854 - DNA, 20 bp, synthetic construct
  misc_feature 1..20: note = chemically synthesized
  source 1..20: mol_type = other DNA
acgcttctgtctgagtgtgc

SEQ ID NO: 56855 - DNA, 20 bp, synthetic construct
  misc_feature 1..20: note = chemically synthesized
  source 1..20: mol_type = other DNA
cgcttctgtctgagtgtgct

SEQ ID NO: 56856 - DNA, 20 bp, synthetic construct
  misc_feature 1..20: note = chemically synthesized
  source 1..20: mol_type = other DNA
ttctgtctgagtgtgctggg

SEQ ID NO: 56857 - DNA, 20 bp, synthetic construct
  misc_feature 1..20: note = chemically synthesized
  source 1..20: mol_type = other DNA
tgtctgagtgtgctgggtgg

SEQ ID NO: 56858 - DNA, 20 bp, synthetic construct
  misc_feature 1..20: note = chemically synthesized
  source 1..20: mol_type = other DNA
gtctgagtgtgctgggtggc

SEQ ID NO: 56859 - DNA, 20 bp, synthetic construct
  misc_feature 1..20: note = chemically synthesized
  source 1..20: mol_type = other DNA
gagtgtgctgggtggcagga

SEQ ID NO: 56860 - DNA, 20 bp, synthetic construct
  misc_feature 1..20: note = chemically synthesized
  source 1..20: mol_type = other DNA
gtgctgggtggcaggatggc

SEQ ID NO: 56861 - DNA, 20 bp, synthetic construct
  misc_feature 1..20: note = chemically synthesized
  source 1..20: mol_type = other DNA
caggatggcaagtccttact

SEQ ID NO: 56862 - DNA, 20 bp, synthetic construct
  misc_feature 1..20: note = chemically synthesized
  source 1..20: mol_type = other DNA
tggcaagtccttactcagct

SEQ ID NO: 56863 - DNA, 20 bp, synthetic construct
  misc_feature 1..20: note = chemically synthesized
  source 1..20: mol_type = other DNA
agtccttactcagctcagta

SEQ ID NO: 56864 - DNA, 20 bp, synthetic construct
  misc_feature 1..20: note = chemically synthesized
  source 1..20: mol_type = other DNA
agccctcttccttgttccct

SEQ ID NO: 56865 - DNA, 20 bp, synthetic construct
  misc_feature 1..20: note = chemically synthesized
  source 1..20: mol_type = other DNA
cctgagcctttgactttctc

SEQ ID NO: 56866 - DNA, 20 bp, synthetic construct
  misc_feature 1..20: note = chemically synthesized
  source 1..20: mol_type = other DNA
ctgagcctttgactttctcg

SEQ ID NO: 56867 - DNA, 20 bp, synthetic construct
  misc_feature 1..20: note = chemically synthesized
  source 1..20: mol_type = other DNA
tgagcctttgactttctcga

SEQ ID NO: 56868 - DNA, 20 bp, synthetic construct
  misc_feature 1..20: note = chemically synthesized
  source 1..20: mol_type = other DNA
gactttctcgagggatgttg

SEQ ID NO: 56869 - DNA, 20 bp, synthetic construct
  misc_feature 1..20: note = chemically synthesized
  source 1..20: mol_type = other DNA
actttctcgagggatgttgt

SEQ ID NO: 56870 - DNA, 20 bp, synthetic construct
  misc_feature 1..20: note = chemically synthesized
  source 1..20: mol_type = other DNA
ctttctcgagggatgttgtg

SEQ ID NO: 56871 - DNA, 20 bp, synthetic construct
  misc_feature 1..20: note = chemically synthesized
  source 1..20: mol_type = other DNA
cgagggatgttgtggggttg

SEQ ID NO: 56872 - DNA, 20 bp, synthetic construct
  misc_feature 1..20: note = chemically synthesized
  source 1..20: mol_type = other DNA
ggatgttgtggggttgtggc

SEQ ID NO: 56873 - DNA, 20 bp, synthetic construct
  misc_feature 1..20: note = chemically synthesized
  source 1..20: mol_type = other DNA
gatgttgtggggttgtggcc

SEQ ID NO: 56874 - DNA, 20 bp, synthetic construct
  misc_feature 1..20: note = chemically synthesized
  source 1..20: mol_type = other DNA
tgtggggttgtggccaggat

SEQ ID NO: 56875 - DNA, 20 bp, synthetic construct
  misc_feature 1..20: note = chemically synthesized
  source 1..20: mol_type = other DNA
gggttgtggccaggataaga

SEQ ID NO: 56876 - DNA, 20 bp, synthetic construct
  misc_feature 1..20: note = chemically synthesized
  source 1..20: mol_type = other DNA
ggttgtggccaggataagaa

SEQ ID NO: 56877 - DNA, 20 bp, synthetic construct
  misc_feature 1..20: note = chemically synthesized
  source 1..20: mol_type = other DNA
gttgtggccaggataagaaa

SEQ ID NO: 56878 - DNA, 20 bp, synthetic construct
  misc_feature 1..20: note = chemically synthesized
  source 1..20: mol_type = other DNA
aggataagaaagggcatttc

SEQ ID NO: 56879 - DNA, 20 bp, synthetic construct
  misc_feature 1..20: note = chemically synthesized
  source 1..20: mol_type = other DNA
ctgctccaaaacaactgttc

SEQ ID NO: 56880 - DNA, 20 bp, synthetic construct
  misc_feature 1..20: note = chemically synthesized
  source 1..20: mol_type = other DNA
caaaacaactgttctggaaa

SEQ ID NO: 56881 - DNA, 20 bp, synthetic construct
  misc_feature 1..20: note = chemically synthesized
  source 1..20: mol_type = other DNA
acaactgttctggaaatagt

SEQ ID NO: 56882 - DNA, 20 bp, synthetic construct
  misc_feature 1..20: note = chemically synthesized
  source 1..20: mol_type = other DNA
aatagtgagtaccccatcct

SEQ ID NO: 56883 - DNA, 20 bp, synthetic construct
  misc_feature 1..20: note = chemically synthesized
  source 1..20: mol_type = other DNA
tagtgagtaccccatcctga

SEQ ID NO: 56884 - DNA, 20 bp, synthetic construct
  misc_feature 1..20: note = chemically synthesized
  source 1..20: mol_type = other DNA
agtgagtaccccatcctgag

SEQ ID NO: 56885 - DNA, 20 bp, synthetic construct
  misc_feature 1..20: note = chemically synthesized
  source 1..20: mol_type = other DNA
agtaccccatcctgagaggt

SEQ ID NO: 56886 - DNA, 20 bp, synthetic construct
  misc_feature 1..20: note = chemically synthesized
  source 1..20: mol_type = other DNA
ccccatcctgagaggtgagt

SEQ ID NO: 56887 - DNA, 20 bp, synthetic construct
  misc_feature 1..20: note = chemically synthesized
  source 1..20: mol_type = other DNA
catcctgagaggtgagtaag

SEQ ID NO: 56888 - DNA, 20 bp, synthetic construct
  misc_feature 1..20: note = chemically synthesized
  source 1..20: mol_type = other DNA
tcctgagaggtgagtaagca

SEQ ID NO: 56889 - DNA, 20 bp, synthetic construct
  misc_feature 1..20: note = chemically synthesized
  source 1..20: mol_type = other DNA
cctgagaggtgagtaagcag

SEQ ID NO: 56890 - DNA, 20 bp, synthetic construct
  misc_feature 1..20: note = chemically synthesized
  source 1..20: mol_type = other DNA
gctgtatgaccacctgaacc

SEQ ID NO: 56891 - DNA, 20 bp, synthetic construct
  misc_feature 1..20: note = chemically synthesized
  source 1..20: mol_type = other DNA
accacctgaaccaagccctt

SEQ ID NO: 56892 - DNA, 20 bp, synthetic construct
  misc_feature 1..20: note = chemically synthesized
  source 1..20: mol_type = other DNA
ccacctgaaccaagcccttg

SEQ ID NO: 56893 - DNA, 20 bp, synthetic construct
  misc_feature 1..20: note = chemically synthesized
  source 1..20: mol_type = other DNA
ccttgaggatgtttcttctc

SEQ ID NO: 56894 - DNA, 20 bp, synthetic construct
  misc_feature 1..20: note = chemically synthesized
  source 1..20: mol_type = other DNA
tgaggatgtttcttctctgg

SEQ ID NO: 56895 - DNA, 20 bp, synthetic construct
  misc_feature 1..20: note = chemically synthesized
  source 1..20: mol_type = other DNA
ggatgtttcttctctggtgg

SEQ ID NO: 56896 - DNA, 20 bp, synthetic construct
  misc_feature 1..20: note = chemically synthesized
  source 1..20: mol_type = other DNA
tttcttctctggtggaagtt

SEQ ID NO: 56897 - DNA, 20 bp, synthetic construct
  misc_feature 1..20: note = chemically synthesized
  source 1..20: mol_type = other DNA
tctctggtggaagtttggaa

SEQ ID NO: 56898 - DNA, 20 bp, synthetic construct
  misc_feature 1..20: note = chemically synthesized
  source 1..20: mol_type = other DNA
ctctggtggaagtttggaac

SEQ ID NO: 56899 - DNA, 20 bp, synthetic construct
  misc_feature 1..20: note = chemically synthesized
  source 1..20: mol_type = other DNA
ctggtggaagtttggaacag

SEQ ID NO: 56900 - DNA, 20 bp, synthetic construct
  misc_feature 1..20: note = chemically synthesized
  source 1..20: mol_type = other DNA
tttggaacaggagcctcctc

SEQ ID NO: 56901 - DNA, 20 bp, synthetic construct
  misc_feature 1..20: note = chemically synthesized
  source 1..20: mol_type = other DNA
tcatttattcattcattcaa

SEQ ID NO: 56902 - DNA, 20 bp, synthetic construct
  misc_feature 1..20: note = chemically synthesized
  source 1..20: mol_type = other DNA
ttcattcaatggttattttg

SEQ ID NO: 56903 - DNA, 20 bp, synthetic construct
  misc_feature 1..20: note = chemically synthesized
  source 1..20: mol_type = other DNA
tcattcaatggttattttgt

SEQ ID NO: 56904 - DNA, 20 bp, synthetic construct
  misc_feature 1..20: note = chemically synthesized
  source 1..20: mol_type = other DNA
tattttgtgggaatcgaatt

SEQ ID NO: 56905 - DNA, 20 bp, synthetic construct
  misc_feature 1..20: note = chemically synthesized
  source 1..20: mol_type = other DNA
tttagaatgaaaatattttt

SEQ ID NO: 56906 - DNA, 20 bp, synthetic construct
  misc_feature 1..20: note = chemically synthesized
  source 1..20: mol_type = other DNA
gaatgaaaatattttttggc

SEQ ID NO: 56907 - DNA, 20 bp, synthetic construct
  misc_feature 1..20: note = chemically synthesized
  source 1..20: mol_type = other DNA
tgaaaatattttttggcaag

SEQ ID NO: 56908 - DNA, 20 bp, synthetic construct
  misc_feature 1..20: note = chemically synthesized
  source 1..20: mol_type = other DNA
ggcaagcagaaaataatttt

SEQ ID NO: 56909 - DNA, 20 bp, synthetic construct
  misc_feature 1..20: note = chemically synthesized
  source 1..20: mol_type = other DNA
ttagaccaatccttttcttt

SEQ ID NO: 56910 - DNA, 20 bp, synthetic construct
  misc_feature 1..20: note = chemically synthesized
  source 1..20: mol_type = other DNA
aatccttttcttttagtcat

SEQ ID NO: 56911 - DNA, 20 bp, synthetic construct
  misc_feature 1..20: note = chemically synthesized
  source 1..20: mol_type = other DNA
tcttttagtcatgagaaact

SEQ ID NO: 56912 - DNA, 20 bp, synthetic construct
  misc_feature 1..20: note = chemically synthesized
  source 1..20: mol_type = other DNA
cttttagtcatgagaaactg

SEQ ID NO: 56913 - DNA, 20 bp, synthetic construct
  misc_feature 1..20: note = chemically synthesized
  source 1..20: mol_type = other DNA
agtcatgagaaactgaggcc

SEQ ID NO: 56914 - DNA, 20 bp, synthetic construct
  misc_feature 1..20: note = chemically synthesized
  source 1..20: mol_type = other DNA
tcatgagaaactgaggccca

SEQ ID NO: 56915 - DNA, 20 bp, synthetic construct
  misc_feature 1..20: note = chemically synthesized
  source 1..20: mol_type = other DNA
atgagaaactgaggcccaga

SEQ ID NO: 56916 - DNA, 20 bp, synthetic construct
  misc_feature 1..20: note = chemically synthesized
  source 1..20: mol_type = other DNA
gagaaactgaggcccagaga

SEQ ID NO: 56917 - DNA, 20 bp, synthetic construct
  misc_feature 1..20: note = chemically synthesized
  source 1..20: mol_type = other DNA
agaaactgaggcccagagag

SEQ ID NO: 56918 - DNA, 20 bp, synthetic construct
  misc_feature 1..20: note = chemically synthesized
  source 1..20: mol_type = other DNA
aaactgaggcccagagagag

SEQ ID NO: 56919 - DNA, 20 bp, synthetic construct
  misc_feature 1..20: note = chemically synthesized
  source 1..20: mol_type = other DNA
aactgaggcccagagagagg

SEQ ID NO: 56920 - DNA, 20 bp, synthetic construct
  misc_feature 1..20: note = chemically synthesized
  source 1..20: mol_type = other DNA
ccagagagaggaggtcaccc

SEQ ID NO: 56921 - DNA, 20 bp, synthetic construct
  misc_feature 1..20: note = chemically synthesized
  source 1..20: mol_type = other DNA
cagagagaggaggtcacccc

SEQ ID NO: 56922 - DNA, 20 bp, synthetic construct
  misc_feature 1..20: note = chemically synthesized
  source 1..20: mol_type = other DNA
ggaggtcaccccaggtgcat

SEQ ID NO: 56923 - DNA, 20 bp, synthetic construct
  misc_feature 1..20: note = chemically synthesized
  source 1..20: mol_type = other DNA
caccccaggtgcattagaac

SEQ ID NO: 56924 - DNA, 20 bp, synthetic construct
  misc_feature 1..20: note = chemically synthesized
  source 1..20: mol_type = other DNA
accccaggtgcattagaact

SEQ ID NO: 56925 - DNA, 20 bp, synthetic construct
  misc_feature 1..20: note = chemically synthesized
  source 1..20: mol_type = other DNA
gtgcattagaactgggtttc

SEQ ID NO: 56926 - DNA, 20 bp, synthetic construct
  misc_feature 1..20: note = chemically synthesized
  source 1..20: mol_type = other DNA
agaactgacactccactgca

SEQ ID NO: 56927 - DNA, 20 bp, synthetic construct
  misc_feature 1..20: note = chemically synthesized
  source 1..20: mol_type = other DNA
aactgacactccactgcaca

SEQ ID NO: 56928 - DNA, 20 bp, synthetic construct
  misc_feature 1..20: note = chemically synthesized
  source 1..20: mol_type = other DNA
caattcattcaatttttatt

SEQ ID NO: 56929 - DNA, 20 bp, synthetic construct
  misc_feature 1..20: note = chemically synthesized
  source 1..20: mol_type = other DNA
ttcattcaatttttatttag

SEQ ID NO: 56930 - DNA, 20 bp, synthetic construct
  misc_feature 1..20: note = chemically synthesized
  source 1..20: mol_type = other DNA
attcaatttttatttagcgg

SEQ ID NO: 56931 - DNA, 20 bp, synthetic construct
  misc_feature 1..20: note = chemically synthesized
  source 1..20: mol_type = other DNA
ttcaatttttatttagcgga

SEQ ID NO: 56932 - DNA, 20 bp, synthetic construct
  misc_feature 1..20: note = chemically synthesized
  source 1..20: mol_type = other DNA
tatttagcggaaggcatttt

SEQ ID NO: 56933 - DNA, 20 bp, synthetic construct
  misc_feature 1..20: note = chemically synthesized
  source 1..20: mol_type = other DNA
tagcggaaggcattttcaga

SEQ ID NO: 56934 - DNA, 20 bp, synthetic construct
  misc_feature 1..20: note = chemically synthesized
  source 1..20: mol_type = other DNA
agcggaaggcattttcagat

SEQ ID NO: 56935 - DNA, 20 bp, synthetic construct
  misc_feature 1..20: note = chemically synthesized
  source 1..20: mol_type = other DNA
cattttcagatgggtctttg

SEQ ID NO: 56936 - DNA, 20 bp, synthetic construct
  misc_feature 1..20: note = chemically synthesized
  source 1..20: mol_type = other DNA
cagatgggtctttgaagcat

SEQ ID NO: 56937 - DNA, 20 bp, synthetic construct
  misc_feature 1..20: note = chemically synthesized
  source 1..20: mol_type = other DNA
atgggtctttgaagcattag

SEQ ID NO: 56938 - DNA, 20 bp, synthetic construct
  misc_feature 1..20: note = chemically synthesized
  source 1..20: mol_type = other DNA
tgggtctttgaagcattagt

SEQ ID NO: 56939 - DNA, 20 bp, synthetic construct
  misc_feature 1..20: note = chemically synthesized
  source 1..20: mol_type = other DNA
ggtctttgaagcattagtag

SEQ ID NO: 56940 - DNA, 20 bp, synthetic construct
  misc_feature 1..20: note = chemically synthesized
  source 1..20: mol_type = other DNA
ttgaagcattagtaggagtt

SEQ ID NO: 56941 - DNA, 20 bp, synthetic construct
  misc_feature 1..20: note = chemically synthesized
  source 1..20: mol_type = other DNA
tagtaggagttcagcgatga

SEQ ID NO: 56942 - DNA, 20 bp, synthetic construct
  misc_feature 1..20: note = chemically synthesized
  source 1..20: mol_type = other DNA
ttcagcgatgatggtgtcat

SEQ ID NO: 56943 - DNA, 20 bp, synthetic construct
  misc_feature 1..20: note = chemically synthesized
  source 1..20: mol_type = other DNA
gtgtcatgagaattttattc

SEQ ID NO: 56944 - DNA, 20 bp, synthetic construct
  misc_feature 1..20: note = chemically synthesized
  source 1..20: mol_type = other DNA
tgtcatgagaattttattct

SEQ ID NO: 56945 - DNA, 20 bp, synthetic construct
  misc_feature 1..20: note = chemically synthesized
  source 1..20: mol_type = other DNA
tgagaattttattctaggat

SEQ ID NO: 56946 - DNA, 20 bp, synthetic construct
  misc_feature 1..20: note = chemically synthesized
  source 1..20: mol_type = other DNA
gagaattttattctaggatt

SEQ ID NO: 56947 - DNA, 20 bp, synthetic construct
  misc_feature 1..20: note = chemically synthesized
  source 1..20: mol_type = other DNA
gaattttattctaggattag

SEQ ID NO: 56948 - DNA, 20 bp, synthetic construct
  misc_feature 1..20: note = chemically synthesized
  source 1..20: mol_type = other DNA
aattttattctaggattagg

SEQ ID NO: 56949 - DNA, 20 bp, synthetic construct
  misc_feature 1..20: note = chemically synthesized
  source 1..20: mol_type = other DNA
attaggaggtaccatgaaca

SEQ ID NO: 56950 - DNA, 20 bp, synthetic construct
  misc_feature 1..20: note = chemically synthesized
  source 1..20: mol_type = other DNA
aggtaccatgaacaaagata

SEQ ID NO: 56951 - DNA, 20 bp, synthetic construct
  misc_feature 1..20: note = chemically synthesized
  source 1..20: mol_type = other DNA
gtaccatgaacaaagataca

SEQ ID NO: 56952 - DNA, 20 bp, synthetic construct
  misc_feature 1..20: note = chemically synthesized
  source 1..20: mol_type = other DNA
catgaacaaagatacagagc

SEQ ID NO: 56953 - DNA, 20 bp, synthetic construct
  misc_feature 1..20: note = chemically synthesized
  source 1..20: mol_type = other DNA
atgaacaaagatacagagct

SEQ ID NO: 56954 - DNA, 20 bp, synthetic construct
  misc_feature 1..20: note = chemically synthesized
  source 1..20: mol_type = other DNA
agatacagagctgggaaaac

SEQ ID NO: 56955 - DNA, 20 bp, synthetic construct
  misc_feature 1..20: note = chemically synthesized
  source 1..20: mol_type = other DNA
atacagagctgggaaaacca

SEQ ID NO: 56956 - DNA, 20 bp, synthetic construct
  misc_feature 1..20: note = chemically synthesized
  source 1..20: mol_type = other DNA
tacagagctgggaaaaccag

SEQ ID NO: 56957 - DNA, 20 bp, synthetic construct
  misc_feature 1..20: note = chemically synthesized
  source 1..20: mol_type = other DNA
agagctgggaaaaccagagg

SEQ ID NO: 56958 - DNA, 20 bp, synthetic construct
  misc_feature 1..20: note = chemically synthesized
  source 1..20: mol_type = other DNA
gctgggaaaaccagaggtgg

SEQ ID NO: 56959 - DNA, 20 bp, synthetic construct
  misc_feature 1..20: note = chemically synthesized
  source 1..20: mol_type = other DNA
gaaaaccagaggtggaagat

SEQ ID NO: 56960 - DNA, 20 bp, synthetic construct
  misc_feature 1..20: note = chemically synthesized
  source 1..20: mol_type = other DNA
aaaaccagaggtggaagata

SEQ ID NO: 56961 - DNA, 20 bp, synthetic construct
  misc_feature 1..20: note = chemically synthesized
  source 1..20: mol_type = other DNA
aaccagaggtggaagataag

SEQ ID NO: 56962 - DNA, 20 bp, synthetic construct
  misc_feature 1..20: note = chemically synthesized
  source 1..20: mol_type = other DNA
agataaggagcacatgtcca

SEQ ID NO: 56963 - DNA, 20 bp, synthetic construct
  misc_feature 1..20: note = chemically synthesized
  source 1..20: mol_type = other DNA
gttctttttctttttttttt

SEQ ID NO: 56964 - DNA, 20 bp, synthetic construct
  misc_feature 1..20: note = chemically synthesized
  source 1..20: mol_type = other DNA
tttttcttttttttttgaga

SEQ ID NO: 56965 - DNA, 20 bp, synthetic construct
  misc_feature 1..20: note = chemically synthesized
  source 1..20: mol_type = other DNA
tttcttttttttttgagatg

SEQ ID NO: 56966 - DNA, 20 bp, synthetic construct
  misc_feature 1..20: note = chemically synthesized
  source 1..20: mol_type = other DNA
ggagtttcgctcttgttgcc

SEQ ID NO: 56967 - DNA, 20 bp, synthetic construct
  misc_feature 1..20: note = chemically synthesized
  source 1..20: mol_type = other DNA
gagtttcgctcttgttgccc

SEQ ID NO: 56968 - DNA, 20 bp, synthetic construct
  misc_feature 1..20: note = chemically synthesized
  source 1..20: mol_type = other DNA
ttcgctcttgttgcccaggc

SEQ ID NO: 56969 - DNA, 20 bp, synthetic construct
  misc_feature 1..20: note = chemically synthesized
  source 1..20: mol_type = other DNA
cgctcttgttgcccaggctg

SEQ ID NO: 56970 - DNA, 20 bp, synthetic construct
  misc_feature 1..20: note = chemically synthesized
  source 1..20: mol_type = other DNA
ttgcccaggctggagtgcaa

SEQ ID NO: 56971 - DNA, 20 bp, synthetic construct
  misc_feature 1..20: note = chemically synthesized
  source 1..20: mol_type = other DNA
caggctggagtgcaatggtg

SEQ ID NO: 56972 - DNA, 20 bp, synthetic construct
  misc_feature 1..20: note = chemically synthesized
  source 1..20: mol_type = other DNA
ggagtgcaatggtgcagtct

SEQ ID NO: 56973 - DNA, 20 bp, synthetic construct
  misc_feature 1..20: note = chemically synthesized
  source 1..20: mol_type = other DNA
tcactgcaacatctgtctcc

SEQ ID NO: 56974 - DNA, 20 bp, synthetic construct
  misc_feature 1..20: note = chemically synthesized
  source 1..20: mol_type = other DNA
cactgcaacatctgtctccc

SEQ ID NO: 56975 - DNA, 20 bp, synthetic construct
  misc_feature 1..20: note = chemically synthesized
  source 1..20: mol_type = other DNA
aacatctgtctcccgggttc

SEQ ID NO: 56976 - DNA, 20 bp, synthetic construct
  misc_feature 1..20: note = chemically synthesized
  source 1..20: mol_type = other DNA
atctgtctcccgggttcaag

SEQ ID NO: 56977 - DNA, 20 bp, synthetic construct
  misc_feature 1..20: note = chemically synthesized
  source 1..20: mol_type = other DNA
ttcaagtggttctcctgcct

SEQ ID NO: 56978 - DNA, 20 bp, synthetic construct
  misc_feature 1..20: note = chemically synthesized
  source 1..20: mol_type = other DNA
ttctcctgcctcagcctccc

SEQ ID NO: 56979 - DNA, 20 bp, synthetic construct
  misc_feature 1..20: note = chemically synthesized
  source 1..20: mol_type = other DNA
tcctgcctcagcctcccaag

SEQ ID NO: 56980 - DNA, 20 bp, synthetic construct
  misc_feature 1..20: note = chemically synthesized
  source 1..20: mol_type = other DNA
gcctcagcctcccaagaagc

SEQ ID NO: 56981 - DNA, 20 bp, synthetic construct
  misc_feature 1..20: note = chemically synthesized
  source 1..20: mol_type = other DNA
cctcagcctcccaagaagct

SEQ ID NO: 56982 - DNA, 20 bp, synthetic construct
  misc_feature 1..20: note = chemically synthesized
  source 1..20: mol_type = other DNA
ctcccaagaagctgggatta

SEQ ID NO: 56983 - DNA, 20 bp, synthetic construct
  misc_feature 1..20: note = chemically synthesized
  source 1..20: mol_type = other DNA
tcccaagaagctgggattac

SEQ ID NO: 56984 - DNA, 20 bp, synthetic construct
  misc_feature 1..20: note = chemically synthesized
  source 1..20: mol_type = other DNA
caggtacctgccaccacgcc

SEQ ID NO: 56985 - DNA, 20 bp, synthetic construct
  misc_feature 1..20: note = chemically synthesized
  source 1..20: mol_type = other DNA
ccggctaatttttgtatttt

SEQ ID NO: 56986 - DNA, 20 bp, synthetic construct
  misc_feature 1..20: note = chemically synthesized
  source 1..20: mol_type = other DNA
gctaatttttgtatttttag

SEQ ID NO: 56987 - DNA, 20 bp, synthetic construct
  misc_feature 1..20: note = chemically synthesized
  source 1..20: mol_type = other DNA
taatttttgtatttttagta

SEQ ID NO: 56988 - DNA, 20 bp, synthetic construct
  misc_feature 1..20: note = chemically synthesized
  source 1..20: mol_type = other DNA
tttttgtatttttagtagag

SEQ ID NO: 56989 - DNA, 20 bp, synthetic construct
  misc_feature 1..20: note = chemically synthesized
  source 1..20: mol_type = other DNA
ttttgtatttttagtagaga

SEQ ID NO: 56990 - DNA, 20 bp, synthetic construct
  misc_feature 1..20: note = chemically synthesized
  source 1..20: mol_type = other DNA
tttgtatttttagtagagaa

SEQ ID NO: 56991 - DNA, 20 bp, synthetic construct
  misc_feature 1..20: note = chemically synthesized
  source 1..20: mol_type = other DNA
ttgtatttttagtagagaag

SEQ ID NO: 56992 - DNA, 20 bp, synthetic construct
  misc_feature 1..20: note = chemically synthesized
  source 1..20: mol_type = other DNA
gagaaggggtttcaccacgt

SEQ ID NO: 56993 - DNA, 20 bp, synthetic construct
  misc_feature 1..20: note = chemically synthesized
  source 1..20: mol_type = other DNA
aggggtttcaccacgttggc

SEQ ID NO: 56994 - DNA, 20 bp, synthetic construct
  misc_feature 1..20: note = chemically synthesized
  source 1..20: mol_type = other DNA
ggggtttcaccacgttggcc

SEQ ID NO: 56995 - DNA, 20 bp, synthetic construct
  misc_feature 1..20: note = chemically synthesized
  source 1..20: mol_type = other DNA
tttcaccacgttggccaggc

SEQ ID NO: 56996 - DNA, 20 bp, synthetic construct
  misc_feature 1..20: note = chemically synthesized
  source 1..20: mol_type = other DNA
tcgcaaactcctgacctcct

SEQ ID NO: 56997 - DNA, 20 bp, synthetic construct
  misc_feature 1..20: note = chemically synthesized
  source 1..20: mol_type = other DNA
caaactcctgacctcctcag

SEQ ID NO: 56998 - DNA, 20 bp, synthetic construct
  misc_feature 1..20: note = chemically synthesized
  source 1..20: mol_type = other DNA
ctgacctcctcagtggatcc

SEQ ID NO: 56999 - DNA, 20 bp, synthetic construct
  misc_feature 1..20: note = chemically synthesized
  source 1..20: mol_type = other DNA
tgacctcctcagtggatccg

SEQ ID NO: 57000 - DNA, 20 bp, synthetic construct
  misc_feature 1..20: note = chemically synthesized
  source 1..20: mol_type = other DNA
acctcctcagtggatccgag

SEQ ID NO: 57001 - DNA, 20 bp, synthetic construct
  misc_feature 1..20: note = chemically synthesized
  source 1..20: mol_type = other DNA
cctcctcagtggatccgagg

SEQ ID NO: 57002 - DNA, 20 bp, synthetic construct
  misc_feature 1..20: note = chemically synthesized
  source 1..20: mol_type = other DNA
aggaggtgatcctcccgcct

SEQ ID NO: 57003 - DNA, 20 bp, synthetic construct
  misc_feature 1..20: note = chemically synthesized
  source 1..20: mol_type = other DNA
cctcccgcctcagcctccca

SEQ ID NO: 57004 - DNA, 20 bp, synthetic construct
  misc_feature 1..20: note = chemically synthesized
  source 1..20: mol_type = other DNA
ctcccaaagtgctcgaatta

SEQ ID NO: 57005 - DNA, 20 bp, synthetic construct
  misc_feature 1..20: note = chemically synthesized
  source 1..20: mol_type = other DNA
tcccaaagtgctcgaattac

SEQ ID NO: 57006 - DNA, 20 bp, synthetic construct
  misc_feature 1..20: note = chemically synthesized
  source 1..20: mol_type = other DNA
agtgctcgaattacaggtgt

SEQ ID NO: 57007 - DNA, 20 bp, synthetic construct
  misc_feature 1..20: note = chemically synthesized
  source 1..20: mol_type = other DNA
caggtgtgagccaccacgcc

SEQ ID NO: 57008 - DNA, 20 bp, synthetic construct
  misc_feature 1..20: note = chemically synthesized
  source 1..20: mol_type = other DNA
gccaccacgcctggcctcca

SEQ ID NO: 57009 - DNA, 20 bp, synthetic construct
  misc_feature 1..20: note = chemically synthesized
  source 1..20: mol_type = other DNA
taaaatgttacgaaaaccaa

SEQ ID NO: 57010 - DNA, 20 bp, synthetic construct
  misc_feature 1..20: note = chemically synthesized
  source 1..20: mol_type = other DNA
tttttttgtgatttatttga

SEQ ID NO: 57011 - DNA, 20 bp, synthetic construct
  misc_feature 1..20: note = chemically synthesized
  source 1..20: mol_type = other DNA
ttttgtgatttatttgatgg

SEQ ID NO: 57012 - DNA, 20 bp, synthetic construct
  misc_feature 1..20: note = chemically synthesized
  source 1..20: mol_type = other DNA
cacctgacgtgaactgacat

SEQ ID NO: 57013 - DNA, 20 bp, synthetic construct
  misc_feature 1..20: note = chemically synthesized
  source 1..20: mol_type = other DNA
acatgagattatttttaatt

SEQ ID NO: 57014 - DNA, 20 bp, synthetic construct
  misc_feature 1..20: note = chemically synthesized
  source 1..20: mol_type = other DNA
tattcatatattttgctgca

SEQ ID NO: 57015 - DNA, 20 bp, synthetic construct
  misc_feature 1..20: note = chemically synthesized
  source 1..20: mol_type = other DNA
atattttgctgcatagatta

SEQ ID NO: 57016 - DNA, 20 bp, synthetic construct
  misc_feature 1..20: note = chemically synthesized
  source 1..20: mol_type = other DNA
gctgcatagattacagtatg

SEQ ID NO: 57017 - DNA, 20 bp, synthetic construct
  misc_feature 1..20: note = chemically synthesized
  source 1..20: mol_type = other DNA
tagattacagtatgcagctc

SEQ ID NO: 57018 - DNA, 20 bp, synthetic construct
  misc_feature 1..20: note = chemically synthesized
  source 1..20: mol_type = other DNA
atgcagctccagattcttcc

SEQ ID NO: 57019 - DNA, 20 bp, synthetic construct
  misc_feature 1..20: note = chemically synthesized
  source 1..20: mol_type = other DNA
cagctccagattcttccaag

SEQ ID NO: 57020 - DNA, 20 bp, synthetic construct
  misc_feature 1..20: note = chemically synthesized
  source 1..20: mol_type = other DNA
tgcctttctaaaatccaaac

SEQ ID NO: 57021 - DNA, 20 bp, synthetic construct
  misc_feature 1..20: note = chemically synthesized
  source 1..20: mol_type = other DNA
ctaaaatccaaacaagttct

SEQ ID NO: 57022 - DNA, 20 bp, synthetic construct
  misc_feature 1..20: note = chemically synthesized
  source 1..20: mol_type = other DNA
taaaatccaaacaagttctg

SEQ ID NO: 57023 - DNA, 20 bp, synthetic construct
  misc_feature 1..20: note = chemically synthesized
  source 1..20: mol_type = other DNA
tctgaggttcaaaaccgttt

SEQ ID NO: 57024 - DNA, 20 bp, synthetic construct
  misc_feature 1..20: note = chemically synthesized
  source 1..20: mol_type = other DNA
ttcaaaaccgttttggccct

SEQ ID NO: 57025 - DNA, 20 bp, synthetic construct
  misc_feature 1..20: note = chemically synthesized
  source 1..20: mol_type = other DNA
tcaaaaccgttttggcccta

SEQ ID NO: 57026 - DNA, 20 bp, synthetic construct
  misc_feature 1..20: note = chemically synthesized
  source 1..20: mol_type = other DNA
ccgttttggccctaaggctt

SEQ ID NO: 57027 - DNA, 20 bp, synthetic construct
  misc_feature 1..20: note = chemically synthesized
  source 1..20: mol_type = other DNA
cgttttggccctaaggcttt

SEQ ID NO: 57028 - DNA, 20 bp, synthetic construct
  misc_feature 1..20: note = chemically synthesized
  source 1..20: mol_type = other DNA
tggccctaaggctttgggta

SEQ ID NO: 57029 - DNA, 20 bp, synthetic construct
  misc_feature 1..20: note = chemically synthesized
  source 1..20: mol_type = other DNA
ggccctaaggctttgggtaa

SEQ ID NO: 57030 - DNA, 20 bp, synthetic construct
  misc_feature 1..20: note = chemically synthesized
  source 1..20: mol_type = other DNA
gccctaaggctttgggtaaa

SEQ ID NO: 57031 - DNA, 20 bp, synthetic construct
  misc_feature 1..20: note = chemically synthesized
  source 1..20: mol_type = other DNA
ccctaaggctttgggtaaag

SEQ ID NO: 57032 - DNA, 20 bp, synthetic construct
  misc_feature 1..20: note = chemically synthesized
  source 1..20: mol_type = other DNA
cctaaggctttgggtaaagg

SEQ ID NO: 57033 - DNA, 20 bp, synthetic construct
  misc_feature 1..20: note = chemically synthesized
  source 1..20: mol_type = other DNA
aaggctttgggtaaaggggg

SEQ ID NO: 57034 - DNA, 20 bp, synthetic construct
  misc_feature 1..20: note = chemically synthesized
  source 1..20: mol_type = other DNA
ggactctgttctactctgac

SEQ ID NO: 57035 - DNA, 20 bp, synthetic construct
  misc_feature 1..20: note = chemically synthesized
  source 1..20: mol_type = other DNA
actctgttctactctgactg

SEQ ID NO: 57036 - DNA, 20 bp, synthetic construct
  misc_feature 1..20: note = chemically synthesized
  source 1..20: mol_type = other DNA
ttctactctgactggagtcc

SEQ ID NO: 57037 - DNA, 20 bp, synthetic construct
  misc_feature 1..20: note = chemically synthesized
  source 1..20: mol_type = other DNA
gagtccaagatgcatatata

SEQ ID NO: 57038 - DNA, 20 bp, synthetic construct
  misc_feature 1..20: note = chemically synthesized
  source 1..20: mol_type = other DNA
gtccaagatgcatatataca

SEQ ID NO: 57039 - DNA, 20 bp, synthetic construct
  misc_feature 1..20: note = chemically synthesized
  source 1..20: mol_type = other DNA
gatgcatatatacagagata

SEQ ID NO: 57040 - DNA, 20 bp, synthetic construct
  misc_feature 1..20: note = chemically synthesized
  source 1..20: mol_type = other DNA
atgcatatatacagagatat

SEQ ID NO: 57041 - DNA, 20 bp, synthetic construct
  misc_feature 1..20: note = chemically synthesized
  source 1..20: mol_type = other DNA
atatacagagatatgggtga

SEQ ID NO: 57042 - DNA, 20 bp, synthetic construct
  misc_feature 1..20: note = chemically synthesized
  source 1..20: mol_type = other DNA
tatacagagatatgggtgat

SEQ ID NO: 57043 - DNA, 20 bp, synthetic construct
  misc_feature 1..20: note = chemically synthesized
  source 1..20: mol_type = other DNA
atacagagatatgggtgatg

SEQ ID NO: 57044 - DNA, 20 bp, synthetic construct
  misc_feature 1..20: note = chemically synthesized
  source 1..20: mol_type = other DNA
gatatgggtgatggggctgc

SEQ ID NO: 57045 - DNA, 20 bp, synthetic construct
  misc_feature 1..20: note = chemically synthesized
  source 1..20: mol_type = other DNA
atatgggtgatggggctgca

SEQ ID NO: 57046 - DNA, 20 bp, synthetic construct
  misc_feature 1..20: note = chemically synthesized
  source 1..20: mol_type = other DNA
tgggtgatggggctgcaagg

SEQ ID NO: 57047 - DNA, 20 bp, synthetic construct
  misc_feature 1..20: note = chemically synthesized
  source 1..20: mol_type = other DNA
gggtgatggggctgcaaggt

SEQ ID NO: 57048 - DNA, 20 bp, synthetic construct
  misc_feature 1..20: note = chemically synthesized
  source 1..20: mol_type = other DNA
atggggctgcaaggtaggtt

SEQ ID NO: 57049 - DNA, 20 bp, synthetic construct
  misc_feature 1..20: note = chemically synthesized
  source 1..20: mol_type = other DNA
tggggctgcaaggtaggttg

SEQ ID NO: 57050 - DNA, 20 bp, synthetic construct
  misc_feature 1..20: note = chemically synthesized
  source 1..20: mol_type = other DNA
ggctgcaaggtaggttgagg

SEQ ID NO: 57051 - DNA, 20 bp, synthetic construct
  misc_feature 1..20: note = chemically synthesized
  source 1..20: mol_type = other DNA
gctgcaaggtaggttgaggt

SEQ ID NO: 57052 - DNA, 20 bp, synthetic construct
  misc_feature 1..20: note = chemically synthesized
  source 1..20: mol_type = other DNA
ctgcaaggtaggttgaggta

SEQ ID NO: 57053 - DNA, 20 bp, synthetic construct
  misc_feature 1..20: note = chemically synthesized
  source 1..20: mol_type = other DNA
tgcaaggtaggttgaggtag

SEQ ID NO: 57054 - DNA, 20 bp, synthetic construct
  misc_feature 1..20: note = chemically synthesized
  source 1..20: mol_type = other DNA
ggtaggttgaggtaggggcc

SEQ ID NO: 57055 - DNA, 20 bp, synthetic construct
  misc_feature 1..20: note = chemically synthesized
  source 1..20: mol_type = other DNA
gtaggttgaggtaggggcca

SEQ ID NO: 57056 - DNA, 20 bp, synthetic construct
  misc_feature 1..20: note = chemically synthesized
  source 1..20: mol_type = other DNA
aggttgaggtaggggccaag

SEQ ID NO: 57057 - DNA, 20 bp, synthetic construct
  misc_feature 1..20: note = chemically synthesized
  source 1..20: mol_type = other DNA
ggttgaggtaggggccaagg

SEQ ID NO: 57058 - DNA, 20 bp, synthetic construct
  misc_feature 1..20: note = chemically synthesized
  source 1..20: mol_type = other DNA
ttgaggtaggggccaaggag

SEQ ID NO: 57059 - DNA, 20 bp, synthetic construct
  misc_feature 1..20: note = chemically synthesized
  source 1..20: mol_type = other DNA
gtaggggccaaggaggagca

SEQ ID NO: 57060 - DNA, 20 bp, synthetic construct
  misc_feature 1..20: note = chemically synthesized
  source 1..20: mol_type = other DNA
aggggccaaggaggagcatg

SEQ ID NO: 57061 - DNA, 20 bp, synthetic construct
  misc_feature 1..20: note = chemically synthesized
  source 1..20: mol_type = other DNA
ccaaggaggagcatggagtt

SEQ ID NO: 57062 - DNA, 20 bp, synthetic construct
  misc_feature 1..20: note = chemically synthesized
  source 1..20: mol_type = other DNA
ggagtttggacttgattcat

SEQ ID NO: 57063 - DNA, 20 bp, synthetic construct
  misc_feature 1..20: note = chemically synthesized
  source 1..20: mol_type = other DNA
gagtttggacttgattcatg

SEQ ID NO: 57064 - DNA, 20 bp, synthetic construct
  misc_feature 1..20: note = chemically synthesized
  source 1..20: mol_type = other DNA
ggacttgattcatgaggctg

SEQ ID NO: 57065 - DNA, 20 bp, synthetic construct
  misc_feature 1..20: note = chemically synthesized
  source 1..20: mol_type = other DNA
gacttgattcatgaggctgt

SEQ ID NO: 57066 - DNA, 20 bp, synthetic construct
  misc_feature 1..20: note = chemically synthesized
  source 1..20: mol_type = other DNA
acttgattcatgaggctgtg

SEQ ID NO: 57067 - DNA, 20 bp, synthetic construct
  misc_feature 1..20: note = chemically synthesized
  source 1..20: mol_type = other DNA
ttgattcatgaggctgtggg

SEQ ID NO: 57068 - DNA, 20 bp, synthetic construct
  misc_feature 1..20: note = chemically synthesized
  source 1..20: mol_type = other DNA
ttcatgaggctgtggggagc

SEQ ID NO: 57069 - DNA, 20 bp, synthetic construct
  misc_feature 1..20: note = chemically synthesized
  source 1..20: mol_type = other DNA
gaggctgtggggagccagtg

SEQ ID NO: 57070 - DNA, 20 bp, synthetic construct
  misc_feature 1..20: note = chemically synthesized
  source 1..20: mol_type = other DNA
aggctgtggggagccagtga

SEQ ID NO: 57071 - DNA, 20 bp, synthetic construct
  misc_feature 1..20: note = chemically synthesized
  source 1..20: mol_type = other DNA
gggagccagtgaaggttctt

SEQ ID NO: 57072 - DNA, 20 bp, synthetic construct
  misc_feature 1..20: note = chemically synthesized
  source 1..20: mol_type = other DNA
agccagtgaaggttcttaag

SEQ ID NO: 57073 - DNA, 20 bp, synthetic construct
  misc_feature 1..20: note = chemically synthesized
  source 1..20: mol_type = other DNA
gccagtgaaggttcttaagc

SEQ ID NO: 57074 - DNA, 20 bp, synthetic construct
  misc_feature 1..20: note = chemically synthesized
  source 1..20: mol_type = other DNA
ttaagcaggtatgtctgcct

SEQ ID NO: 57075 - DNA, 20 bp, synthetic construct
  misc_feature 1..20: note = chemically synthesized
  source 1..20: mol_type = other DNA
aagcaggtatgtctgcctga

SEQ ID NO: 57076 - DNA, 20 bp, synthetic construct
  misc_feature 1..20: note = chemically synthesized
  source 1..20: mol_type = other DNA
caggtatgtctgcctgagag

SEQ ID NO: 57077 - DNA, 20 bp, synthetic construct
  misc_feature 1..20: note = chemically synthesized
  source 1..20: mol_type = other DNA
tatgtctgcctgagagcagt

SEQ ID NO: 57078 - DNA, 20 bp, synthetic construct
  misc_feature 1..20: note = chemically synthesized
  source 1..20: mol_type = other DNA
tgtctgcctgagagcagttg

SEQ ID NO: 57079 - DNA, 20 bp, synthetic construct
  misc_feature 1..20: note = chemically synthesized
  source 1..20: mol_type = other DNA
ctgcctgagagcagttggag

SEQ ID NO: 57080 - DNA, 20 bp, synthetic construct
  misc_feature 1..20: note = chemically synthesized
  source 1..20: mol_type = other DNA
tgagagcagttggagcagac

SEQ ID NO: 57081 - DNA, 20 bp, synthetic construct
  misc_feature 1..20: note = chemically synthesized
  source 1..20: mol_type = other DNA
agagcagttggagcagacaa

SEQ ID NO: 57082 - DNA, 20 bp, synthetic construct
  misc_feature 1..20: note = chemically synthesized
  source 1..20: mol_type = other DNA
aaaaaccaaacaaatcacca

SEQ ID NO: 57083 - DNA, 20 bp, synthetic construct
  misc_feature 1..20: note = chemically synthesized
  source 1..20: mol_type = other DNA
accaaacaaatcaccataga

SEQ ID NO: 57084 - DNA, 20 bp, synthetic construct
  misc_feature 1..20: note = chemically synthesized
  source 1..20: mol_type = other DNA
aaacaaatcaccatagatag

SEQ ID NO: 57085 - DNA, 20 bp, synthetic construct
  misc_feature 1..20: note = chemically synthesized
  source 1..20: mol_type = other DNA
tgtcccctccaaatctcatg

SEQ ID NO: 57086 - DNA, 20 bp, synthetic construct
  misc_feature 1..20: note = chemically synthesized
  source 1..20: mol_type = other DNA
ccaaatctcatgtggaaatt

SEQ ID NO: 57087 - DNA, 20 bp, synthetic construct
  misc_feature 1..20: note = chemically synthesized
  source 1..20: mol_type = other DNA
tcatgtggaaatttggtcct

SEQ ID NO: 57088 - DNA, 20 bp, synthetic construct
  misc_feature 1..20: note = chemically synthesized
  source 1..20: mol_type = other DNA
ggaaatttggtcctcagtgt

SEQ ID NO: 57089 - DNA, 20 bp, synthetic construct
  misc_feature 1..20: note = chemically synthesized
  source 1..20: mol_type = other DNA
aatttggtcctcagtgttgg

SEQ ID NO: 57090 - DNA, 20 bp, synthetic construct
  misc_feature 1..20: note = chemically synthesized
  source 1..20: mol_type = other DNA
ttggtcctcagtgttggaag

SEQ ID NO: 57091 - DNA, 20 bp, synthetic construct
  misc_feature 1..20: note = chemically synthesized
  source 1..20: mol_type = other DNA
tggtcctcagtgttggaagt

SEQ ID NO: 57092 - DNA, 20 bp, synthetic construct
  misc_feature 1..20: note = chemically synthesized
  source 1..20: mol_type = other DNA
ggtcctcagtgttggaagtg

SEQ ID NO: 57093 - DNA, 20 bp, synthetic construct
  misc_feature 1..20: note = chemically synthesized
  source 1..20: mol_type = other DNA
gtgttggaagtggggcctaa

SEQ ID NO: 57094 - DNA, 20 bp, synthetic construct
  misc_feature 1..20: note = chemically synthesized
  source 1..20: mol_type = other DNA
tgttggaagtggggcctaat

SEQ ID NO: 57095 - DNA, 20 bp, synthetic construct
  misc_feature 1..20: note = chemically synthesized
  source 1..20: mol_type = other DNA
ttggaagtggggcctaatgg

SEQ ID NO: 57096 - DNA, 20 bp, synthetic construct
  misc_feature 1..20: note = chemically synthesized
  source 1..20: mol_type = other DNA
tggaagtggggcctaatggg

SEQ ID NO: 57097 - DNA, 20 bp, synthetic construct
  misc_feature 1..20: note = chemically synthesized
  source 1..20: mol_type = other DNA
ggggcctaatgggaggtgtt

SEQ ID NO: 57098 - DNA, 20 bp, synthetic construct
  misc_feature 1..20: note = chemically synthesized
  source 1..20: mol_type = other DNA
gggcctaatgggaggtgttt

SEQ ID NO: 57099 - DNA, 20 bp, synthetic construct
  misc_feature 1..20: note = chemically synthesized
  source 1..20: mol_type = other DNA
aatgggaggtgtttgggtca

SEQ ID NO: 57100 - DNA, 20 bp, synthetic construct
  misc_feature 1..20: note = chemically synthesized
  source 1..20: mol_type = other DNA
atgggaggtgtttgggtcat

SEQ ID NO: 57101 - DNA, 20 bp, synthetic construct
  misc_feature 1..20: note = chemically synthesized
  source 1..20: mol_type = other DNA
tgggaggtgtttgggtcatg

SEQ ID NO: 57102 - DNA, 20 bp, synthetic construct
  misc_feature 1..20: note = chemically synthesized
  source 1..20: mol_type = other DNA
gggaggtgtttgggtcatgg

SEQ ID NO: 57103 - DNA, 20 bp, synthetic construct
  misc_feature 1..20: note = chemically synthesized
  source 1..20: mol_type = other DNA
gaggtgtttgggtcatgggg

SEQ ID NO: 57104 - DNA, 20 bp, synthetic construct
  misc_feature 1..20: note = chemically synthesized
  source 1..20: mol_type = other DNA
aggtgtttgggtcatggggg

SEQ ID NO: 57105 - DNA, 20 bp, synthetic construct
  misc_feature 1..20: note = chemically synthesized
  source 1..20: mol_type = other DNA
tgggggaggaacccctgtga

SEQ ID NO: 57106 - DNA, 20 bp, synthetic construct
  misc_feature 1..20: note = chemically synthesized
  source 1..20: mol_type = other DNA
gggggaggaacccctgtgaa

SEQ ID NO: 57107 - DNA, 20 bp, synthetic construct
  misc_feature 1..20: note = chemically synthesized
  source 1..20: mol_type = other DNA
aggaacccctgtgaaaggct

SEQ ID NO: 57108 - DNA, 20 bp, synthetic construct
  misc_feature 1..20: note = chemically synthesized
  source 1..20: mol_type = other DNA
ggtgccgtccttgtgataat

SEQ ID NO: 57109 - DNA, 20 bp, synthetic construct
  misc_feature 1..20: note = chemically synthesized
  source 1..20: mol_type = other DNA
ccgtccttgtgataatgagt

SEQ ID NO: 57110 - DNA, 20 bp, synthetic construct
  misc_feature 1..20: note = chemically synthesized
  source 1..20: mol_type = other DNA
tcccgctatgatttcccttg

SEQ ID NO: 57111 - DNA, 20 bp, synthetic construct
  misc_feature 1..20: note = chemically synthesized
  source 1..20: mol_type = other DNA
cccgctatgatttcccttga

SEQ ID NO: 57112 - DNA, 20 bp, synthetic construct
  misc_feature 1..20: note = chemically synthesized
  source 1..20: mol_type = other DNA
cttgaaggctgattattaaa

SEQ ID NO: 57113 - DNA, 20 bp, synthetic construct
  misc_feature 1..20: note = chemically synthesized
  source 1..20: mol_type = other DNA
tgaaggctgattattaaaaa

SEQ ID NO: 57114 - DNA, 20 bp, synthetic construct
  misc_feature 1..20: note = chemically synthesized
  source 1..20: mol_type = other DNA
gctgattattaaaaagagct

SEQ ID NO: 57115 - DNA, 20 bp, synthetic construct
  misc_feature 1..20: note = chemically synthesized
  source 1..20: mol_type = other DNA
gtgattgatctctgcacatg

SEQ ID NO: 57116 - DNA, 20 bp, synthetic construct
  misc_feature 1..20: note = chemically synthesized
  source 1..20: mol_type = other DNA
tgattgatctctgcacatgt

SEQ ID NO: 57117 - DNA, 20 bp, synthetic construct
  misc_feature 1..20: note = chemically synthesized
  source 1..20: mol_type = other DNA
tccccttcaccttctgccat

SEQ ID NO: 57118 - DNA, 20 bp, synthetic construct
  misc_feature 1..20: note = chemically synthesized
  source 1..20: mol_type = other DNA
tcaccttctgccatcagtga

SEQ ID NO: 57119 - DNA, 20 bp, synthetic construct
  misc_feature 1..20: note = chemically synthesized
  source 1..20: mol_type = other DNA
ccttctgccatcagtgaaag

SEQ ID NO: 57120 - DNA, 20 bp, synthetic construct
  misc_feature 1..20: note = chemically synthesized
  source 1..20: mol_type = other DNA
gccatcagtgaaagcagctt

SEQ ID NO: 57121 - DNA, 20 bp, synthetic construct
  misc_feature 1..20: note = chemically synthesized
  source 1..20: mol_type = other DNA
ccatcagtgaaagcagctta

SEQ ID NO: 57122 - DNA, 20 bp, synthetic construct
  misc_feature 1..20: note = chemically synthesized
  source 1..20: mol_type = other DNA
aagcagcttaaggccctcac

SEQ ID NO: 57123 - DNA, 20 bp, synthetic construct
  misc_feature 1..20: note = chemically synthesized
  source 1..20: mol_type = other DNA
cagcttaaggccctcaccag

SEQ ID NO: 57124 - DNA, 20 bp, synthetic construct
  misc_feature 1..20: note = chemically synthesized
  source 1..20: mol_type = other DNA
cttaaggccctcaccagaag

SEQ ID NO: 57125 - DNA, 20 bp, synthetic construct
  misc_feature 1..20: note = chemically synthesized
  source 1..20: mol_type = other DNA
ccctcaccagaagcagatgc

SEQ ID NO: 57126 - DNA, 20 bp, synthetic construct
  misc_feature 1..20: note = chemically synthesized
  source 1..20: mol_type = other DNA
gatgctggtgccatgcttcc

SEQ ID NO: 57127 - DNA, 20 bp, synthetic construct
  misc_feature 1..20: note = chemically synthesized
  source 1..20: mol_type = other DNA
tgctggtgccatgcttcctg

SEQ ID NO: 57128 - DNA, 20 bp, synthetic construct
  misc_feature 1..20: note = chemically synthesized
  source 1..20: mol_type = other DNA
ctggtgccatgcttcctgga

SEQ ID NO: 57129 - DNA, 20 bp, synthetic construct
  misc_feature 1..20: note = chemically synthesized
  source 1..20: mol_type = other DNA
catgcttcctggagagcttg

SEQ ID NO: 57130 - DNA, 20 bp, synthetic construct
  misc_feature 1..20: note = chemically synthesized
  source 1..20: mol_type = other DNA
tggagagcttgcagaatcat

SEQ ID NO: 57131 - DNA, 20 bp, synthetic construct
  misc_feature 1..20: note = chemically synthesized
  source 1..20: mol_type = other DNA
ccttgtaaattactcacctt

SEQ ID NO: 57132 - DNA, 20 bp, synthetic construct
  misc_feature 1..20: note = chemically synthesized
  source 1..20: mol_type = other DNA
cttgtaaattactcaccttc

SEQ ID NO: 57133 - DNA, 20 bp, synthetic construct
  misc_feature 1..20: note = chemically synthesized
  source 1..20: mol_type = other DNA
ccttcaggtattcctttata

SEQ ID NO: 57134 - DNA, 20 bp, synthetic construct
  misc_feature 1..20: note = chemically synthesized
  source 1..20: mol_type = other DNA
tcctttatatagcaacacaa

SEQ ID NO: 57135 - DNA, 20 bp, synthetic construct
  misc_feature 1..20: note = chemically synthesized
  source 1..20: mol_type = other DNA
cctttatatagcaacacaaa

SEQ ID NO: 57136 - DNA, 20 bp, synthetic construct
  misc_feature 1..20: note = chemically synthesized
  source 1..20: mol_type = other DNA
tatagcaacacaaaaggact

SEQ ID NO: 57137 - DNA, 20 bp, synthetic construct
  misc_feature 1..20: note = chemically synthesized
  source 1..20: mol_type = other DNA
gcaacacaaaaggactaaga

SEQ ID NO: 57138 - DNA, 20 bp, synthetic construct
  misc_feature 1..20: note = chemically synthesized
  source 1..20: mol_type = other DNA
acacaaaaggactaagacag

SEQ ID NO: 57139 - DNA, 20 bp, synthetic construct
  misc_feature 1..20: note = chemically synthesized
  source 1..20: mol_type = other DNA
cttgacttttctctctcttt

SEQ ID NO: 57140 - DNA, 20 bp, synthetic construct
  misc_feature 1..20: note = chemically synthesized
  source 1..20: mol_type = other DNA
gacttttctctctctttaag

SEQ ID NO: 57141 - DNA, 20 bp, synthetic construct
  misc_feature 1..20: note = chemically synthesized
  source 1..20: mol_type = other DNA
aagtgttgcctttgctcact

SEQ ID NO: 57142 - DNA, 20 bp, synthetic construct
  misc_feature 1..20: note = chemically synthesized
  source 1..20: mol_type = other DNA
atcccttctgcctgcatttg

SEQ ID NO: 57143 - DNA, 20 bp, synthetic construct
  misc_feature 1..20: note = chemically synthesized
  source 1..20: mol_type = other DNA
cccttctgcctgcatttgta

SEQ ID NO: 57144 - DNA, 20 bp, synthetic construct
  misc_feature 1..20: note = chemically synthesized
  source 1..20: mol_type = other DNA
gcctgcatttgtagagcatc

SEQ ID NO: 57145 - DNA, 20 bp, synthetic construct
  misc_feature 1..20: note = chemically synthesized
  source 1..20: mol_type = other DNA
gcatttgtagagcatctgga

SEQ ID NO: 57146 - DNA, 20 bp, synthetic construct
  misc_feature 1..20: note = chemically synthesized
  source 1..20: mol_type = other DNA
catttgtagagcatctggat

SEQ ID NO: 57147 - DNA, 20 bp, synthetic construct
  misc_feature 1..20: note = chemically synthesized
  source 1..20: mol_type = other DNA
tttgtagagcatctggatgg

SEQ ID NO: 57148 - DNA, 20 bp, synthetic construct
  misc_feature 1..20: note = chemically synthesized
  source 1..20: mol_type = other DNA
accgtcactcttgactttcc

SEQ ID NO: 57149 - DNA, 20 bp, synthetic construct
  misc_feature 1..20: note = chemically synthesized
  source 1..20: mol_type = other DNA
gtcactcttgactttcccag

SEQ ID NO: 57150 - DNA, 20 bp, synthetic construct
  misc_feature 1..20: note = chemically synthesized
  source 1..20: mol_type = other DNA
tcactcttgactttcccagc

SEQ ID NO: 57151 - DNA, 20 bp, synthetic construct
  misc_feature 1..20: note = chemically synthesized
  source 1..20: mol_type = other DNA
ttcccagcaggcctatgtca

SEQ ID NO: 57152 - DNA, 20 bp, synthetic construct
  misc_feature 1..20: note = chemically synthesized
  source 1..20: mol_type = other DNA
tcccagcaggcctatgtcat

SEQ ID NO: 57153 - DNA, 20 bp, synthetic construct
  misc_feature 1..20: note = chemically synthesized
  source 1..20: mol_type = other DNA
ggcctatgtcataggtactg

SEQ ID NO: 57154 - DNA, 20 bp, synthetic construct
  misc_feature 1..20: note = chemically synthesized
  source 1..20: mol_type = other DNA
gtactgtggtctctacaata

SEQ ID NO: 57155 - DNA, 20 bp, synthetic construct
  misc_feature 1..20: note = chemically synthesized
  source 1..20: mol_type = other DNA
ctgtggtctctacaatacag

SEQ ID NO: 57156 - DNA, 20 bp, synthetic construct
  misc_feature 1..20: note = chemically synthesized
  source 1..20: mol_type = other DNA
gtggtctctacaatacagca

SEQ ID NO: 57157 - DNA, 20 bp, synthetic construct
  misc_feature 1..20: note = chemically synthesized
  source 1..20: mol_type = other DNA
tggtctctacaatacagcag

SEQ ID NO: 57158 - DNA, 20 bp, synthetic construct
  misc_feature 1..20: note = chemically synthesized
  source 1..20: mol_type = other DNA
acaatacagcagaggtatct

SEQ ID NO: 57159 - DNA, 20 bp, synthetic construct
  misc_feature 1..20: note = chemically synthesized
  source 1..20: mol_type = other DNA
caatacagcagaggtatctg

SEQ ID NO: 57160 - DNA, 20 bp, synthetic construct
  misc_feature 1..20: note = chemically synthesized
  source 1..20: mol_type = other DNA
gcagaggtatctgaggctcc

SEQ ID NO: 57161 - DNA, 20 bp, synthetic construct
  misc_feature 1..20: note = chemically synthesized
  source 1..20: mol_type = other DNA
agaggtatctgaggctccga

SEQ ID NO: 57162 - DNA, 20 bp, synthetic construct
  misc_feature 1..20: note = chemically synthesized
  source 1..20: mol_type = other DNA
gaggtatctgaggctccgag

SEQ ID NO: 57163 - DNA, 20 bp, synthetic construct
  misc_feature 1..20: note = chemically synthesized
  source 1..20: mol_type = other DNA
atctgaggctccgagaggtt

SEQ ID NO: 57164 - DNA, 20 bp, synthetic construct
  misc_feature 1..20: note = chemically synthesized
  source 1..20: mol_type = other DNA
gaggttgagtgacttgctca

SEQ ID NO: 57165 - DNA, 20 bp, synthetic construct
  misc_feature 1..20: note = chemically synthesized
  source 1..20: mol_type = other DNA
cttgctcatggctgcacaac

SEQ ID NO: 57166 - DNA, 20 bp, synthetic construct
  misc_feature 1..20: note = chemically synthesized
  source 1..20: mol_type = other DNA
gctgcacaaccagtaaatat

SEQ ID NO: 57167 - DNA, 20 bp, synthetic construct
  misc_feature 1..20: note = chemically synthesized
  source 1..20: mol_type = other DNA
tgcacaaccagtaaatattg

SEQ ID NO: 57168 - DNA, 20 bp, synthetic construct
  misc_feature 1..20: note = chemically synthesized
  source 1..20: mol_type = other DNA
caaccagtaaatattggagc

SEQ ID NO: 57169 - DNA, 20 bp, synthetic construct
  misc_feature 1..20: note = chemically synthesized
  source 1..20: mol_type = other DNA
taaatattggagctggaatt

SEQ ID NO: 57170 - DNA, 20 bp, synthetic construct
  misc_feature 1..20: note = chemically synthesized
  source 1..20: mol_type = other DNA
aaatattggagctggaattc

SEQ ID NO: 57171 - DNA, 20 bp, synthetic construct
  misc_feature 1..20: note = chemically synthesized
  source 1..20: mol_type = other DNA
ggagctggaattcaggtcca

SEQ ID NO: 57172 - DNA, 20 bp, synthetic construct
  misc_feature 1..20: note = chemically synthesized
  source 1..20: mol_type = other DNA
aattcaggtccacggtttcc

SEQ ID NO: 57173 - DNA, 20 bp, synthetic construct
  misc_feature 1..20: note = chemically synthesized
  source 1..20: mol_type = other DNA
tccacggtttcctggctcca

SEQ ID NO: 57174 - DNA, 20 bp, synthetic construct
  misc_feature 1..20: note = chemically synthesized
  source 1..20: mol_type = other DNA
ttccctcaatttattctgac

SEQ ID NO: 57175 - DNA, 20 bp, synthetic construct
  misc_feature 1..20: note = chemically synthesized
  source 1..20: mol_type = other DNA
tccctcaatttattctgact

SEQ ID NO: 57176 - DNA, 20 bp, synthetic construct
  misc_feature 1..20: note = chemically synthesized
  source 1..20: mol_type = other DNA
ccctcaatttattctgactg

SEQ ID NO: 57177 - DNA, 20 bp, synthetic construct
  misc_feature 1..20: note = chemically synthesized
  source 1..20: mol_type = other DNA
aatttattctgactggggca

SEQ ID NO: 57178 - DNA, 20 bp, synthetic construct
  misc_feature 1..20: note = chemically synthesized
  source 1..20: mol_type = other DNA
atttattctgactggggcat

SEQ ID NO: 57179 - DNA, 20 bp, synthetic construct
  misc_feature 1..20: note = chemically synthesized
  source 1..20: mol_type = other DNA
tttattctgactggggcatg

SEQ ID NO: 57180 - DNA, 20 bp, synthetic construct
  misc_feature 1..20: note = chemically synthesized
  source 1..20: mol_type = other DNA
ttattctgactggggcatgg

SEQ ID NO: 57181 - DNA, 20 bp, synthetic construct
  misc_feature 1..20: note = chemically synthesized
  source 1..20: mol_type = other DNA
attctgactggggcatgggg

SEQ ID NO: 57182 - DNA, 20 bp, synthetic construct
  misc_feature 1..20: note = chemically synthesized
  source 1..20: mol_type = other DNA
ttctgactggggcatggggg

SEQ ID NO: 57183 - DNA, 20 bp, synthetic construct
  misc_feature 1..20: note = chemically synthesized
  source 1..20: mol_type = other DNA
tctgactggggcatggggga

SEQ ID NO: 57184 - DNA, 20 bp, synthetic construct
  misc_feature 1..20: note = chemically synthesized
  source 1..20: mol_type = other DNA
ctgactggggcatgggggag

SEQ ID NO: 57185 - DNA, 20 bp, synthetic construct
  misc_feature 1..20: note = chemically synthesized
  source 1..20: mol_type = other DNA
tgactggggcatgggggagg

SEQ ID NO: 57186 - DNA, 20 bp, synthetic construct
  misc_feature 1..20: note = chemically synthesized
  source 1..20: mol_type = other DNA
ctggggcatgggggaggggg

SEQ ID NO: 57187 - DNA, 20 bp, synthetic construct
  misc_feature 1..20: note = chemically synthesized
  source 1..20: mol_type = other DNA
atgggggagggggtggcctt

SEQ ID NO: 57188 - DNA, 20 bp, synthetic construct
  misc_feature 1..20: note = chemically synthesized
  source 1..20: mol_type = other DNA
tgggggagggggtggccttt

SEQ ID NO: 57189 - DNA, 20 bp, synthetic construct
  misc_feature 1..20: note = chemically synthesized
  source 1..20: mol_type = other DNA
gggagggggtggcctttggg

SEQ ID NO: 57190 - DNA, 20 bp, synthetic construct
  misc_feature 1..20: note = chemically synthesized
  source 1..20: mol_type = other DNA
ggagggggtggcctttgggc

SEQ ID NO: 57191 - DNA, 20 bp, synthetic construct
  misc_feature 1..20: note = chemically synthesized
  source 1..20: mol_type = other DNA
gagggggtggcctttgggca

SEQ ID NO: 57192 - DNA, 20 bp, synthetic construct
  misc_feature 1..20: note = chemically synthesized
  source 1..20: mol_type = other DNA
tggcctttgggcagggccac

SEQ ID NO: 57193 - DNA, 20 bp, synthetic construct
  misc_feature 1..20: note = chemically synthesized
  source 1..20: mol_type = other DNA
ggcctttgggcagggccacc

SEQ ID NO: 57194 - DNA, 20 bp, synthetic construct
  misc_feature 1..20: note = chemically synthesized
  source 1..20: mol_type = other DNA
cctttgggcagggccaccag

SEQ ID NO: 57195 - DNA, 20 bp, synthetic construct
  misc_feature 1..20: note = chemically synthesized
  source 1..20: mol_type = other DNA
gcagggccaccaggagcgac

SEQ ID NO: 57196 - DNA, 20 bp, synthetic construct
  misc_feature 1..20: note = chemically synthesized
  source 1..20: mol_type = other DNA
cagggccaccaggagcgacc

SEQ ID NO: 57197 - DNA, 20 bp, synthetic construct
  misc_feature 1..20: note = chemically synthesized
  source 1..20: mol_type = other DNA
accaggagcgaccaggcccg

SEQ ID NO: 57198 - DNA, 20 bp, synthetic construct
  misc_feature 1..20: note = chemically synthesized
  source 1..20: mol_type = other DNA
caggagcgaccaggcccgta

SEQ ID NO: 57199 - DNA, 20 bp, synthetic construct
  misc_feature 1..20: note = chemically synthesized
  source 1..20: mol_type = other DNA
ggagcgaccaggcccgtaga

SEQ ID NO: 57200 - DNA, 20 bp, synthetic construct
  misc_feature 1..20: note = chemically synthesized
  source 1..20: mol_type = other DNA
cgaccaggcccgtagagagc

SEQ ID NO: 57201 - DNA, 20 bp, synthetic construct
  misc_feature 1..20: note = chemically synthesized
  source 1..20: mol_type = other DNA
gaccaggcccgtagagagct

SEQ ID NO: 57202 - DNA, 20 bp, synthetic construct
  misc_feature 1..20: note = chemically synthesized
  source 1..20: mol_type = other DNA
ggcccgtagagagctgggtg

SEQ ID NO: 57203 - DNA, 20 bp, synthetic construct
  misc_feature 1..20: note = chemically synthesized
  source 1..20: mol_type = other DNA
gcccgtagagagctgggtgc

SEQ ID NO: 57204 - DNA, 20 bp, synthetic construct
  misc_feature 1..20: note = chemically synthesized
  source 1..20: mol_type = other DNA
tagagagctgggtgcaggta

SEQ ID NO: 57205 - DNA, 20 bp, synthetic construct
  misc_feature 1..20: note = chemically synthesized
  source 1..20: mol_type = other DNA
gagagctgggtgcaggtaca

SEQ ID NO: 57206 - DNA, 20 bp, synthetic construct
  misc_feature 1..20: note = chemically synthesized
  source 1..20: mol_type = other DNA
agagctgggtgcaggtacag

SEQ ID NO: 57207 - DNA, 20 bp, synthetic construct
  misc_feature 1..20: note = chemically synthesized
  source 1..20: mol_type = other DNA
acagaggaaaacctgttgtc

SEQ ID NO: 57208 - DNA, 20 bp, synthetic construct
  misc_feature 1..20: note = chemically synthesized
  source 1..20: mol_type = other DNA
ggaaaacctgttgtcgagtg

SEQ ID NO: 57209 - DNA, 20 bp, synthetic construct
  misc_feature 1..20: note = chemically synthesized
  source 1..20: mol_type = other DNA
ctgttgtcgagtgtggcccg

SEQ ID NO: 57210 - DNA, 20 bp, synthetic construct
  misc_feature 1..20: note = chemically synthesized
  source 1..20: mol_type = other DNA
agttcccatttttgcctgaa

SEQ ID NO: 57211 - DNA, 20 bp, synthetic construct
  misc_feature 1..20: note = chemically synthesized
  source 1..20: mol_type = other DNA
tgcctgaatggcacatttga

SEQ ID NO: 57212 - DNA, 20 bp, synthetic construct
  misc_feature 1..20: note = chemically synthesized
  source 1..20: mol_type = other DNA
tataaccatgtgaataataa

SEQ ID NO: 57213 - DNA, 20 bp, synthetic construct
  misc_feature 1..20: note = chemically synthesized
  source 1..20: mol_type = other DNA
accatgtgaataataatagt

SEQ ID NO: 57214 - DNA, 20 bp, synthetic construct
  misc_feature 1..20: note = chemically synthesized
  source 1..20: mol_type = other DNA
taataatagttggcctatat

SEQ ID NO: 57215 - DNA, 20 bp, synthetic construct
  misc_feature 1..20: note = chemically synthesized
  source 1..20: mol_type = other DNA
gagttctttaatttgctttt

SEQ ID NO: 57216 - DNA, 20 bp, synthetic construct
  misc_feature 1..20: note = chemically synthesized
  source 1..20: mol_type = other DNA
tttgctttttggtccgcatt

SEQ ID NO: 57217 - DNA, 20 bp, synthetic construct
  misc_feature 1..20: note = chemically synthesized
  source 1..20: mol_type = other DNA
tctcttttgttgtaatttgt

SEQ ID NO: 57218 - DNA, 20 bp, synthetic construct
  misc_feature 1..20: note = chemically synthesized
  source 1..20: mol_type = other DNA
cttttgttgtaatttgtaag

SEQ ID NO: 57219 - DNA, 20 bp, synthetic construct
  misc_feature 1..20: note = chemically synthesized
  source 1..20: mol_type = other DNA
ttttgttgtaatttgtaagt

SEQ ID NO: 57220 - DNA, 20 bp, synthetic construct
  misc_feature 1..20: note = chemically synthesized
  source 1..20: mol_type = other DNA
tttgttgtaatttgtaagta

SEQ ID NO: 57221 - DNA, 20 bp, synthetic construct
  misc_feature 1..20: note = chemically synthesized
  source 1..20: mol_type = other DNA
ttgttgtaatttgtaagtag

SEQ ID NO: 57222 - DNA, 20 bp, synthetic construct
  misc_feature 1..20: note = chemically synthesized
  source 1..20: mol_type = other DNA
tgtaatttgtaagtaggggt

SEQ ID NO: 57223 - DNA, 20 bp, synthetic construct
  misc_feature 1..20: note = chemically synthesized
  source 1..20: mol_type = other DNA
ttgtaagtaggggtgagata

SEQ ID NO: 57224 - DNA, 20 bp, synthetic construct
  misc_feature 1..20: note = chemically synthesized
  source 1..20: mol_type = other DNA
ggggtgagataaagtacacc

SEQ ID NO: 57225 - DNA, 20 bp, synthetic construct
  misc_feature 1..20: note = chemically synthesized
  source 1..20: mol_type = other DNA
gggtgagataaagtacacct

SEQ ID NO: 57226 - DNA, 20 bp, synthetic construct
  misc_feature 1..20: note = chemically synthesized
  source 1..20: mol_type = other DNA
ggtgagataaagtacaccta

SEQ ID NO: 57227 - DNA, 20 bp, synthetic construct
  misc_feature 1..20: note = chemically synthesized
  source 1..20: mol_type = other DNA
aaagtacacctagggtttgc

SEQ ID NO: 57228 - DNA, 20 bp, synthetic construct
  misc_feature 1..20: note = chemically synthesized
  source 1..20: mol_type = other DNA
aagtacacctagggtttgct

SEQ ID NO: 57229 - DNA, 20 bp, synthetic construct
  misc_feature 1..20: note = chemically synthesized
  source 1..20: mol_type = other DNA
tcatcatgttcctccttgca

SEQ ID NO: 57230 - DNA, 20 bp, synthetic construct
  misc_feature 1..20: note = chemically synthesized
  source 1..20: mol_type = other DNA
catcatgttcctccttgcat

SEQ ID NO: 57231 - DNA, 20 bp, synthetic construct
  misc_feature 1..20: note = chemically synthesized
  source 1..20: mol_type = other DNA
atcatgttcctccttgcatg

SEQ ID NO: 57232 - DNA, 20 bp, synthetic construct
  misc_feature 1..20: note = chemically synthesized
  source 1..20: mol_type = other DNA
tgttcctccttgcatggggc

SEQ ID NO: 57233 - DNA, 20 bp, synthetic construct
  misc_feature 1..20: note = chemically synthesized
  source 1..20: mol_type = other DNA
gttcctccttgcatggggcc

SEQ ID NO: 57234 - DNA, 20 bp, synthetic construct
  misc_feature 1..20: note = chemically synthesized
  source 1..20: mol_type = other DNA
ttgcatggggccaggatccg

SEQ ID NO: 57235 - DNA, 20 bp, synthetic construct
  misc_feature 1..20: note = chemically synthesized
  source 1..20: mol_type = other DNA
gcatggggccaggatccgtg

SEQ ID NO: 57236 - DNA, 20 bp, synthetic construct
  misc_feature 1..20: note = chemically synthesized
  source 1..20: mol_type = other DNA
catggggccaggatccgtgg

SEQ ID NO: 57237 - DNA, 20 bp, synthetic construct
  misc_feature 1..20: note = chemically synthesized
  source 1..20: mol_type = other DNA
caggatccgtggaggttgcc

SEQ ID NO: 57238 - DNA, 20 bp, synthetic construct
  misc_feature 1..20: note = chemically synthesized
  source 1..20: mol_type = other DNA
gaggttgcctggcacctacg

SEQ ID NO: 57239 - DNA, 20 bp, synthetic construct
  misc_feature 1..20: note = chemically synthesized
  source 1..20: mol_type = other DNA
gttgcctggcacctacgtgg

SEQ ID NO: 57240 - DNA, 20 bp, synthetic construct
  misc_feature 1..20: note = chemically synthesized
  source 1..20: mol_type = other DNA
gcacctacgtggtggtgctg

SEQ ID NO: 57241 - DNA, 20 bp, synthetic construct
  misc_feature 1..20: note = chemically synthesized
  source 1..20: mol_type = other DNA
cacctacgtggtggtgctga

SEQ ID NO: 57242 - DNA, 20 bp, synthetic construct
  misc_feature 1..20: note = chemically synthesized
  source 1..20: mol_type = other DNA
cctacgtggtggtgctgaag

SEQ ID NO: 57243 - DNA, 20 bp, synthetic construct
  misc_feature 1..20: note = chemically synthesized
  source 1..20: mol_type = other DNA
ctacgtggtggtgctgaagg

SEQ ID NO: 57244 - DNA, 20 bp, synthetic construct
  misc_feature 1..20: note = chemically synthesized
  source 1..20: mol_type = other DNA
acgtggtggtgctgaaggag

SEQ ID NO: 57245 - DNA, 20 bp, synthetic construct
  misc_feature 1..20: note = chemically synthesized
  source 1..20: mol_type = other DNA
aggaggagacccacctctcg

SEQ ID NO: 57246 - DNA, 20 bp, synthetic construct
  misc_feature 1..20: note = chemically synthesized
  source 1..20: mol_type = other DNA
ggagacccacctctcgcagt

SEQ ID NO: 57247 - DNA, 20 bp, synthetic construct
  misc_feature 1..20: note = chemically synthesized
  source 1..20: mol_type = other DNA
agacccacctctcgcagtca

SEQ ID NO: 57248 - DNA, 20 bp, synthetic construct
  misc_feature 1..20: note = chemically synthesized
  source 1..20: mol_type = other DNA
agcgcactgcccgccgcctg

SEQ ID NO: 57249 - DNA, 20 bp, synthetic construct
  misc_feature 1..20: note = chemically synthesized
  source 1..20: mol_type = other DNA
gcgcactgcccgccgcctgc

SEQ ID NO: 57250 - DNA, 20 bp, synthetic construct
  misc_feature 1..20: note = chemically synthesized
  source 1..20: mol_type = other DNA
ctgcccgccgcctgcaggcc

SEQ ID NO: 57251 - DNA, 20 bp, synthetic construct
  misc_feature 1..20: note = chemically synthesized
  source 1..20: mol_type = other DNA
tgcccgccgcctgcaggccc

SEQ ID NO: 57252 - DNA, 20 bp, synthetic construct
  misc_feature 1..20: note = chemically synthesized
  source 1..20: mol_type = other DNA
tgcaggcccaggctgcccgc

SEQ ID NO: 57253 - DNA, 20 bp, synthetic construct
  misc_feature 1..20: note = chemically synthesized
  source 1..20: mol_type = other DNA
gcaggcccaggctgcccgcc

SEQ ID NO: 57254 - DNA, 20 bp, synthetic construct
  misc_feature 1..20: note = chemically synthesized
  source 1..20: mol_type = other DNA
caggcccaggctgcccgccg

SEQ ID NO: 57255 - DNA, 20 bp, synthetic construct
  misc_feature 1..20: note = chemically synthesized
  source 1..20: mol_type = other DNA
cccgccggggatacctcacc

SEQ ID NO: 57256 - DNA, 20 bp, synthetic construct
  misc_feature 1..20: note = chemically synthesized
  source 1..20: mol_type = other DNA
aagatcctgcatgtcttcca

SEQ ID NO: 57257 - DNA, 20 bp, synthetic construct
  misc_feature 1..20: note = chemically synthesized
  source 1..20: mol_type = other DNA
gtcttccatggccttcttcc

SEQ ID NO: 57258 - DNA, 20 bp, synthetic construct
  misc_feature 1..20: note = chemically synthesized
  source 1..20: mol_type = other DNA
tggccttcttcctggcttcc

SEQ ID NO: 57259 - DNA, 20 bp, synthetic construct
  misc_feature 1..20: note = chemically synthesized
  source 1..20: mol_type = other DNA
ttcttcctggcttcctggtg

SEQ ID NO: 57260 - DNA, 20 bp, synthetic construct
  misc_feature 1..20: note = chemically synthesized
  source 1..20: mol_type = other DNA
cctggcttcctggtgaagat

SEQ ID NO: 57261 - DNA, 20 bp, synthetic construct
  misc_feature 1..20: note = chemically synthesized
  source 1..20: mol_type = other DNA
ggcttcctggtgaagatgag

SEQ ID NO: 57262 - DNA, 20 bp, synthetic construct
  misc_feature 1..20: note = chemically synthesized
  source 1..20: mol_type = other DNA
gaagatgagtggcgacctgc

SEQ ID NO: 57263 - DNA, 20 bp, synthetic construct
  misc_feature 1..20: note = chemically synthesized
  source 1..20: mol_type = other DNA
agatgagtggcgacctgctg

SEQ ID NO: 57264 - DNA, 20 bp, synthetic construct
  misc_feature 1..20: note = chemically synthesized
  source 1..20: mol_type = other DNA
gagtggcgacctgctggagc

SEQ ID NO: 57265 - DNA, 20 bp, synthetic construct
  misc_feature 1..20: note = chemically synthesized
  source 1..20: mol_type = other DNA
ggcgacctgctggagctggt

SEQ ID NO: 57266 - DNA, 20 bp, synthetic construct
  misc_feature 1..20: note = chemically synthesized
  source 1..20: mol_type = other DNA
agctggtgagccaccctttt

SEQ ID NO: 57267 - DNA, 20 bp, synthetic construct
  misc_feature 1..20: note = chemically synthesized
  source 1..20: mol_type = other DNA
gctggtgagccacccttttt

SEQ ID NO: 57268 - DNA, 20 bp, synthetic construct
  misc_feature 1..20: note = chemically synthesized
  source 1..20: mol_type = other DNA
tgagccaccctttttgggaa

SEQ ID NO: 57269 - DNA, 20 bp, synthetic construct
  misc_feature 1..20: note = chemically synthesized
  source 1..20: mol_type = other DNA
ttgggaatggcacttcctga

SEQ ID NO: 57270 - DNA, 20 bp, synthetic construct
  misc_feature 1..20: note = chemically synthesized
  source 1..20: mol_type = other DNA
tgggaatggcacttcctgat

SEQ ID NO: 57271 - DNA, 20 bp, synthetic construct
  misc_feature 1..20: note = chemically synthesized
  source 1..20: mol_type = other DNA
gggaatggcacttcctgata

SEQ ID NO: 57272 - DNA, 20 bp, synthetic construct
  misc_feature 1..20: note = chemically synthesized
  source 1..20: mol_type = other DNA
atggcacttcctgatagggc

SEQ ID NO: 57273 - DNA, 20 bp, synthetic construct
  misc_feature 1..20: note = chemically synthesized
  source 1..20: mol_type = other DNA
tggcacttcctgatagggct

SEQ ID NO: 57274 - DNA, 20 bp, synthetic construct
  misc_feature 1..20: note = chemically synthesized
  source 1..20: mol_type = other DNA
ctgggccactgcatatacac

SEQ ID NO: 57275 - DNA, 20 bp, synthetic construct
  misc_feature 1..20: note = chemically synthesized
  source 1..20: mol_type = other DNA
tgggccactgcatatacact

SEQ ID NO: 57276 - DNA, 20 bp, synthetic construct
  misc_feature 1..20: note = chemically synthesized
  source 1..20: mol_type = other DNA
gggccactgcatatacactg

SEQ ID NO: 57277 - DNA, 20 bp, synthetic construct
  misc_feature 1..20: note = chemically synthesized
  source 1..20: mol_type = other DNA
tatacactggggactgtgct

SEQ ID NO: 57278 - DNA, 20 bp, synthetic construct
  misc_feature 1..20: note = chemically synthesized
  source 1..20: mol_type = other DNA
acactggggactgtgcttag

SEQ ID NO: 57279 - DNA, 20 bp, synthetic construct
  misc_feature 1..20: note = chemically synthesized
  source 1..20: mol_type = other DNA
cactggggactgtgcttagt

SEQ ID NO: 57280 - DNA, 20 bp, synthetic construct
  misc_feature 1..20: note = chemically synthesized
  source 1..20: mol_type = other DNA
gtaggcccattgctgaaaat

SEQ ID NO: 57281 - DNA, 20 bp, synthetic construct
  misc_feature 1..20: note = chemically synthesized
  source 1..20: mol_type = other DNA
ggcccattgctgaaaatcag

SEQ ID NO: 57282 - DNA, 20 bp, synthetic construct
  misc_feature 1..20: note = chemically synthesized
  source 1..20: mol_type = other DNA
gcccattgctgaaaatcaga

SEQ ID NO: 57283 - DNA, 20 bp, synthetic construct
  misc_feature 1..20: note = chemically synthesized
  source 1..20: mol_type = other DNA
cccattgctgaaaatcagaa

SEQ ID NO: 57284 - DNA, 20 bp, synthetic construct
  misc_feature 1..20: note = chemically synthesized
  source 1..20: mol_type = other DNA
ccattgctgaaaatcagaag

SEQ ID NO: 57285 - DNA, 20 bp, synthetic construct
  misc_feature 1..20: note = chemically synthesized
  source 1..20: mol_type = other DNA
tgctgaaaatcagaagggga

SEQ ID NO: 57286 - DNA, 20 bp, synthetic construct
  misc_feature 1..20: note = chemically synthesized
  source 1..20: mol_type = other DNA
gaaaatcagaaggggacagc

SEQ ID NO: 57287 - DNA, 20 bp, synthetic construct
  misc_feature 1..20: note = chemically synthesized
  source 1..20: mol_type = other DNA
ggggacagcaagtatgtatt

SEQ ID NO: 57288 - DNA, 20 bp, synthetic construct
  misc_feature 1..20: note = chemically synthesized
  source 1..20: mol_type = other DNA
agtatgtattgagcacttat

SEQ ID NO: 57289 - DNA, 20 bp, synthetic construct
  misc_feature 1..20: note = chemically synthesized
  source 1..20: mol_type = other DNA
gtatgtattgagcacttatc

SEQ ID NO: 57290 - DNA, 20 bp, synthetic construct
  misc_feature 1..20: note = chemically synthesized
  source 1..20: mol_type = other DNA
ttgagcacttatcgggtacc

SEQ ID NO: 57291 - DNA, 20 bp, synthetic construct
  misc_feature 1..20: note = chemically synthesized
  source 1..20: mol_type = other DNA
cacttatcgggtaccaagca

SEQ ID NO: 57292 - DNA, 20 bp, synthetic construct
  misc_feature 1..20: note = chemically synthesized
  source 1..20: mol_type = other DNA
gtaccaagcacagtaactac

SEQ ID NO: 57293 - DNA, 20 bp, synthetic construct
  misc_feature 1..20: note = chemically synthesized
  source 1..20: mol_type = other DNA
gtaactactggctttctgta

SEQ ID NO: 57294 - DNA, 20 bp, synthetic construct
  misc_feature 1..20: note = chemically synthesized
  source 1..20: mol_type = other DNA
ttctgtatagaattcccttt

SEQ ID NO: 57295 - DNA, 20 bp, synthetic construct
  misc_feature 1..20: note = chemically synthesized
  source 1..20: mol_type = other DNA
tatagaattccctttaagcc

SEQ ID NO: 57296 - DNA, 20 bp, synthetic construct
  misc_feature 1..20: note = chemically synthesized
  source 1..20: mol_type = other DNA
ctttaagcctggccatgccc

SEQ ID NO: 57297 - DNA, 20 bp, synthetic construct
  misc_feature 1..20: note = chemically synthesized
  source 1..20: mol_type = other DNA
taagcctggccatgccccag

SEQ ID NO: 57298 - DNA, 20 bp, synthetic construct
  misc_feature 1..20: note = chemically synthesized
  source 1..20: mol_type = other DNA
gtacgtctatcttcatttga

SEQ ID NO: 57299 - DNA, 20 bp, synthetic construct
  misc_feature 1..20: note = chemically synthesized
  source 1..20: mol_type = other DNA
tctatcttcatttgaaagac

SEQ ID NO: 57300 - DNA, 20 bp, synthetic construct
  misc_feature 1..20: note = chemically synthesized
  source 1..20: mol_type = other DNA
ctatcttcatttgaaagacg

SEQ ID NO: 57301 - DNA, 20 bp, synthetic construct
  misc_feature 1..20: note = chemically synthesized
  source 1..20: mol_type = other DNA
atcttcatttgaaagacgag

SEQ ID NO: 57302 - DNA, 20 bp, synthetic construct
  misc_feature 1..20: note = chemically synthesized
  source 1..20: mol_type = other DNA
tttgaaagacgaggagactg

SEQ ID NO: 57303 - DNA, 20 bp, synthetic construct
  misc_feature 1..20: note = chemically synthesized
  source 1..20: mol_type = other DNA
aagacgaggagactgaagtt

SEQ ID NO: 57304 - DNA, 20 bp, synthetic construct
  misc_feature 1..20: note = chemically synthesized
  source 1..20: mol_type = other DNA
gacgaggagactgaagttca

SEQ ID NO: 57305 - DNA, 20 bp, synthetic construct
  misc_feature 1..20: note = chemically synthesized
  source 1..20: mol_type = other DNA
acgaggagactgaagttcag

SEQ ID NO: 57306 - DNA, 20 bp, synthetic construct
  misc_feature 1..20: note = chemically synthesized
  source 1..20: mol_type = other DNA
cgaggagactgaagttcaga

SEQ ID NO: 57307 - DNA, 20 bp, synthetic construct
  misc_feature 1..20: note = chemically synthesized
  source 1..20: mol_type = other DNA
gaggagactgaagttcagag

SEQ ID NO: 57308 - DNA, 20 bp, synthetic construct
  misc_feature 1..20: note = chemically synthesized
  source 1..20: mol_type = other DNA
gaagttcagaggggaccaca

SEQ ID NO: 57309 - DNA, 20 bp, synthetic construct
  misc_feature 1..20: note = chemically synthesized
  source 1..20: mol_type = other DNA
ttcagaggggaccacacaga

SEQ ID NO: 57310 - DNA, 20 bp, synthetic construct
  misc_feature 1..20: note = chemically synthesized
  source 1..20: mol_type = other DNA
gaggggaccacacagacagc

SEQ ID NO: 57311 - DNA, 20 bp, synthetic construct
  misc_feature 1..20: note = chemically synthesized
  source 1..20: mol_type = other DNA
aggggaccacacagacagct

SEQ ID NO: 57312 - DNA, 20 bp, synthetic construct
  misc_feature 1..20: note = chemically synthesized
  source 1..20: mol_type = other DNA
ggggaccacacagacagcta

SEQ ID NO: 57313 - DNA, 20 bp, synthetic construct
  misc_feature 1..20: note = chemically synthesized
  source 1..20: mol_type = other DNA
gggaccacacagacagctag

SEQ ID NO: 57314 - DNA, 20 bp, synthetic construct
  misc_feature 1..20: note = chemically synthesized
  source 1..20: mol_type = other DNA
accacacagacagctagggg

SEQ ID NO: 57315 - DNA, 20 bp, synthetic construct
  misc_feature 1..20: note = chemically synthesized
  source 1..20: mol_type = other DNA
cacacagacagctaggggta

SEQ ID NO: 57316 - DNA, 20 bp, synthetic construct
  misc_feature 1..20: note = chemically synthesized
  source 1..20: mol_type = other DNA
agacagctaggggtagagcc

SEQ ID NO: 57317 - DNA, 20 bp, synthetic construct
  misc_feature 1..20: note = chemically synthesized
  source 1..20: mol_type = other DNA
agagcctggatcaaacccat

SEQ ID NO: 57318 - DNA, 20 bp, synthetic construct
  misc_feature 1..20: note = chemically synthesized
  source 1..20: mol_type = other DNA
aaacccattggtctgcctgc

SEQ ID NO: 57319 - DNA, 20 bp, synthetic construct
  misc_feature 1..20: note = chemically synthesized
  source 1..20: mol_type = other DNA
gccaatgcatctgctgccta

SEQ ID NO: 57320 - DNA, 20 bp, synthetic construct
  misc_feature 1..20: note = chemically synthesized
  source 1..20: mol_type = other DNA
ctgctgcctacggaaacctg

SEQ ID NO: 57321 - DNA, 20 bp, synthetic construct
  misc_feature 1..20: note = chemically synthesized
  source 1..20: mol_type = other DNA
tgctgcctacggaaacctgt

SEQ ID NO: 57322 - DNA, 20 bp, synthetic construct
  misc_feature 1..20: note = chemically synthesized
  source 1..20: mol_type = other DNA
gctgcctacggaaacctgta

SEQ ID NO: 57323 - DNA, 20 bp, synthetic construct
  misc_feature 1..20: note = chemically synthesized
  source 1..20: mol_type = other DNA
ctacggaaacctgtagggac

SEQ ID NO: 57324 - DNA, 20 bp, synthetic construct
  misc_feature 1..20: note = chemically synthesized
  source 1..20: mol_type = other DNA
tacggaaacctgtagggaca

SEQ ID NO: 57325 - DNA, 20 bp, synthetic construct
  misc_feature 1..20: note = chemically synthesized
  source 1..20: mol_type = other DNA
aacctgtagggacaaggccc

SEQ ID NO: 57326 - DNA, 20 bp, synthetic construct
  misc_feature 1..20: note = chemically synthesized
  source 1..20: mol_type = other DNA
acctgtagggacaaggccct

SEQ ID NO: 57327 - DNA, 20 bp, synthetic construct
  misc_feature 1..20: note = chemically synthesized
  source 1..20: mol_type = other DNA
ggacaaggccctgggatgtt

SEQ ID NO: 57328 - DNA, 20 bp, synthetic construct
  misc_feature 1..20: note = chemically synthesized
  source 1..20: mol_type = other DNA
caaggccctgggatgttcag

SEQ ID NO: 57329 - DNA, 20 bp, synthetic construct
  misc_feature 1..20: note = chemically synthesized
  source 1..20: mol_type = other DNA
aggccctgggatgttcagtg

SEQ ID NO: 57330 - DNA, 20 bp, synthetic construct
  misc_feature 1..20: note = chemically synthesized
  source 1..20: mol_type = other DNA
tgggatgttcagtggagcct

SEQ ID NO: 57331 - DNA, 20 bp, synthetic construct
  misc_feature 1..20: note = chemically synthesized
  source 1..20: mol_type = other DNA
gcctgagtcattttataaaa

SEQ ID NO: 57332 - DNA, 20 bp, synthetic construct
  misc_feature 1..20: note = chemically synthesized
  source 1..20: mol_type = other DNA
tttataaaaaagcatgactc

SEQ ID NO: 57333 - DNA, 20 bp, synthetic construct
  misc_feature 1..20: note = chemically synthesized
  source 1..20: mol_type = other DNA
ttataaaaaagcatgactct

SEQ ID NO: 57334 - DNA, 20 bp, synthetic construct
  misc_feature 1..20: note = chemically synthesized
  source 1..20: mol_type = other DNA
tataaaaaagcatgactcta

SEQ ID NO: 57335 - DNA, 20 bp, synthetic construct
  misc_feature 1..20: note = chemically synthesized
  source 1..20: mol_type = other DNA
tagggtccaaaattcctttg

SEQ ID NO: 57336 - DNA, 20 bp, synthetic construct
  misc_feature 1..20: note = chemically synthesized
  source 1..20: mol_type = other DNA
cctttgaagctgttgctatc

SEQ ID NO: 57337 - DNA, 20 bp, synthetic construct
  misc_feature 1..20: note = chemically synthesized
  source 1..20: mol_type = other DNA
tttgaagctgttgctatcca

SEQ ID NO: 57338 - DNA, 20 bp, synthetic construct
  misc_feature 1..20: note = chemically synthesized
  source 1..20: mol_type = other DNA
agctgttgctatccagagtg

SEQ ID NO: 57339 - DNA, 20 bp, synthetic construct
  misc_feature 1..20: note = chemically synthesized
  source 1..20: mol_type = other DNA
ccagagtgaagtcccttctt

SEQ ID NO: 57340 - DNA, 20 bp, synthetic construct
  misc_feature 1..20: note = chemically synthesized
  source 1..20: mol_type = other DNA
cagagtgaagtcccttcttt

SEQ ID NO: 57341 - DNA, 20 bp, synthetic construct
  misc_feature 1..20: note = chemically synthesized
  source 1..20: mol_type = other DNA
gtgaagtcccttctttagga

SEQ ID NO: 57342 - DNA, 20 bp, synthetic construct
  misc_feature 1..20: note = chemically synthesized
  source 1..20: mol_type = other DNA
tgaagtcccttctttaggac

SEQ ID NO: 57343 - DNA, 20 bp, synthetic construct
  misc_feature 1..20: note = chemically synthesized
  source 1..20: mol_type = other DNA
gaagtcccttctttaggaca

SEQ ID NO: 57344 - DNA, 20 bp, synthetic construct
  misc_feature 1..20: note = chemically synthesized
  source 1..20: mol_type = other DNA
gtcccttctttaggacaggg

SEQ ID NO: 57345 - DNA, 20 bp, synthetic construct
  misc_feature 1..20: note = chemically synthesized
  source 1..20: mol_type = other DNA
agggtggccctcctccctcc

SEQ ID NO: 57346 - DNA, 20 bp, synthetic construct
  misc_feature 1..20: note = chemically synthesized
  source 1..20: mol_type = other DNA
cctcctggatgtcacatctt

SEQ ID NO: 57347 - DNA, 20 bp, synthetic construct
  misc_feature 1..20: note = chemically synthesized
  source 1..20: mol_type = other DNA
cctggatgtcacatcttcgg

SEQ ID NO: 57348 - DNA, 20 bp, synthetic construct
  misc_feature 1..20: note = chemically synthesized
  source 1..20: mol_type = other DNA
tggatgtcacatcttcggtg

SEQ ID NO: 57349 - DNA, 20 bp, synthetic construct
  misc_feature 1..20: note = chemically synthesized
  source 1..20: mol_type = other DNA
ggatgtcacatcttcggtgg

SEQ ID NO: 57350 - DNA, 20 bp, synthetic construct
  misc_feature 1..20: note = chemically synthesized
  source 1..20: mol_type = other DNA
gatgtcacatcttcggtgga

SEQ ID NO: 57351 - DNA, 20 bp, synthetic construct
  misc_feature 1..20: note = chemically synthesized
  source 1..20: mol_type = other DNA
atgtcacatcttcggtggag

SEQ ID NO: 57352 - DNA, 20 bp, synthetic construct
  misc_feature 1..20: note = chemically synthesized
  source 1..20: mol_type = other DNA
tcacatcttcggtggagggg

SEQ ID NO: 57353 - DNA, 20 bp, synthetic construct
  misc_feature 1..20: note = chemically synthesized
  source 1..20: mol_type = other DNA
atcttcggtggaggggcaga

SEQ ID NO: 57354 - DNA, 20 bp, synthetic construct
  misc_feature 1..20: note = chemically synthesized
  source 1..20: mol_type = other DNA
tcttcggtggaggggcagaa

SEQ ID NO: 57355 - DNA, 20 bp, synthetic construct
  misc_feature 1..20: note = chemically synthesized
  source 1..20: mol_type = other DNA
cttcggtggaggggcagaaa

SEQ ID NO: 57356 - DNA, 20 bp, synthetic construct
  misc_feature 1..20: note = chemically synthesized
  source 1..20: mol_type = other DNA
ttcggtggaggggcagaaag

SEQ ID NO: 57357 - DNA, 20 bp, synthetic construct
  misc_feature 1..20: note = chemically synthesized
  source 1..20: mol_type = other DNA
tggaggggcagaaaggggac

SEQ ID NO: 57358 - DNA, 20 bp, synthetic construct
  misc_feature 1..20: note = chemically synthesized
  source 1..20: mol_type = other DNA
ggaggggcagaaaggggact

SEQ ID NO: 57359 - DNA, 20 bp, synthetic construct
  misc_feature 1..20: note = chemically synthesized
  source 1..20: mol_type = other DNA
actgggtattctcctcaccc

SEQ ID NO: 57360 - DNA, 20 bp, synthetic construct
  misc_feature 1..20: note = chemically synthesized
  source 1..20: mol_type = other DNA
tattctcctcaccctggccc

SEQ ID NO: 57361 - DNA, 20 bp, synthetic construct
  misc_feature 1..20: note = chemically synthesized
  source 1..20: mol_type = other DNA
tgtgcttctgcaccaccttc

SEQ ID NO: 57362 - DNA, 20 bp, synthetic construct
  misc_feature 1..20: note = chemically synthesized
  source 1..20: mol_type = other DNA
acaaataaaaacgttttttt

SEQ ID NO: 57363 - DNA, 20 bp, synthetic construct
  misc_feature 1..20: note = chemically synthesized
  source 1..20: mol_type = other DNA
aaacgtttttttaagatttg

SEQ ID NO: 57364 - DNA, 20 bp, synthetic construct
  misc_feature 1..20: note = chemically synthesized
  source 1..20: mol_type = other DNA
ttttttaagatttgaagcac

SEQ ID NO: 57365 - DNA, 20 bp, synthetic construct
  misc_feature 1..20: note = chemically synthesized
  source 1..20: mol_type = other DNA
tttttaagatttgaagcact

SEQ ID NO: 57366 - DNA, 20 bp, synthetic construct
  misc_feature 1..20: note = chemically synthesized
  source 1..20: mol_type = other DNA
ttttaagatttgaagcacta

SEQ ID NO: 57367 - DNA, 20 bp, synthetic construct
  misc_feature 1..20: note = chemically synthesized
  source 1..20: mol_type = other DNA
aagatttgaagcactagggc

SEQ ID NO: 57368 - DNA, 20 bp, synthetic construct
  misc_feature 1..20: note = chemically synthesized
  source 1..20: mol_type = other DNA
agatttgaagcactagggcc

SEQ ID NO: 57369 - DNA, 20 bp, synthetic construct
  misc_feature 1..20: note = chemically synthesized
  source 1..20: mol_type = other DNA
gatttgaagcactagggcca

SEQ ID NO: 57370 - DNA, 20 bp, synthetic construct
  misc_feature 1..20: note = chemically synthesized
  source 1..20: mol_type = other DNA
tgaagcactagggccagggt

SEQ ID NO: 57371 - DNA, 20 bp, synthetic construct
  misc_feature 1..20: note = chemically synthesized
  source 1..20: mol_type = other DNA
gaagcactagggccagggtg

SEQ ID NO: 57372 - DNA, 20 bp, synthetic construct
  misc_feature 1..20: note = chemically synthesized
  source 1..20: mol_type = other DNA
agcactagggccagggtgag

SEQ ID NO: 57373 - DNA, 20 bp, synthetic construct
  misc_feature 1..20: note = chemically synthesized
  source 1..20: mol_type = other DNA
gccagggtgaggagaatacc

SEQ ID NO: 57374 - DNA, 20 bp, synthetic construct
  misc_feature 1..20: note = chemically synthesized
  source 1..20: mol_type = other DNA
ccctttctgcccctccaccg

SEQ ID NO: 57375 - DNA, 20 bp, synthetic construct
  misc_feature 1..20: note = chemically synthesized
  source 1..20: mol_type = other DNA
tccaccgaagatgtgacatc

SEQ ID NO: 57376 - DNA, 20 bp, synthetic construct
  misc_feature 1..20: note = chemically synthesized
  source 1..20: mol_type = other DNA
ccaccgaagatgtgacatcc

SEQ ID NO: 57377 - DNA, 20 bp, synthetic construct
  misc_feature 1..20: note = chemically synthesized
  source 1..20: mol_type = other DNA
accgaagatgtgacatccag

SEQ ID NO: 57378 - DNA, 20 bp, synthetic construct
  misc_feature 1..20: note = chemically synthesized
  source 1..20: mol_type = other DNA
ccgaagatgtgacatccagg

SEQ ID NO: 57379 - DNA, 20 bp, synthetic construct
  misc_feature 1..20: note = chemically synthesized
  source 1..20: mol_type = other DNA
cgaagatgtgacatccagga

SEQ ID NO: 57380 - DNA, 20 bp, synthetic construct
  misc_feature 1..20: note = chemically synthesized
  source 1..20: mol_type = other DNA
aagatgtgacatccaggagg

SEQ ID NO: 57381 - DNA, 20 bp, synthetic construct
  misc_feature 1..20: note = chemically synthesized
  source 1..20: mol_type = other DNA
agatgtgacatccaggaggg

SEQ ID NO: 57382 - DNA, 20 bp, synthetic construct
  misc_feature 1..20: note = chemically synthesized
  source 1..20: mol_type = other DNA
atgtgacatccaggagggag

SEQ ID NO: 57383 - DNA, 20 bp, synthetic construct
  misc_feature 1..20: note = chemically synthesized
  source 1..20: mol_type = other DNA
tgtgacatccaggagggagg

SEQ ID NO: 57384 - DNA, 20 bp, synthetic construct
  misc_feature 1..20: note = chemically synthesized
  source 1..20: mol_type = other DNA
gtgacatccaggagggagga

SEQ ID NO: 57385 - DNA, 20 bp, synthetic construct
  misc_feature 1..20: note = chemically synthesized
  source 1..20: mol_type = other DNA
aggagggccaccctgtccta

SEQ ID NO: 57386 - DNA, 20 bp, synthetic construct
  misc_feature 1..20: note = chemically synthesized
  source 1..20: mol_type = other DNA
agggccaccctgtcctaaag

SEQ ID NO: 57387 - DNA, 20 bp, synthetic construct
  misc_feature 1..20: note = chemically synthesized
  source 1..20: mol_type = other DNA
gggccaccctgtcctaaaga

SEQ ID NO: 57388 - DNA, 20 bp, synthetic construct
  misc_feature 1..20: note = chemically synthesized
  source 1..20: mol_type = other DNA
ggccaccctgtcctaaagaa

SEQ ID NO: 57389 - DNA, 20 bp, synthetic construct
  misc_feature 1..20: note = chemically synthesized
  source 1..20: mol_type = other DNA
ctaaagaagggacttcactc

SEQ ID NO: 57390 - DNA, 20 bp, synthetic construct
  misc_feature 1..20: note = chemically synthesized
  source 1..20: mol_type = other DNA
agaagggacttcactctgga

SEQ ID NO: 57391 - DNA, 20 bp, synthetic construct
  misc_feature 1..20: note = chemically synthesized
  source 1..20: mol_type = other DNA
gacttcactctggatagcaa

SEQ ID NO: 57392 - DNA, 20 bp, synthetic construct
  misc_feature 1..20: note = chemically synthesized
  source 1..20: mol_type = other DNA
tctggatagcaacagcttca

SEQ ID NO: 57393 - DNA, 20 bp, synthetic construct
  misc_feature 1..20: note = chemically synthesized
  source 1..20: mol_type = other DNA
ctggatagcaacagcttcaa

SEQ ID NO: 57394 - DNA, 20 bp, synthetic construct
  misc_feature 1..20: note = chemically synthesized
  source 1..20: mol_type = other DNA
caacagcttcaaaggaattt

SEQ ID NO: 57395 - DNA, 20 bp, synthetic construct
  misc_feature 1..20: note = chemically synthesized
  source 1..20: mol_type = other DNA
ttcaaaggaattttggaccc

SEQ ID NO: 57396 - DNA, 20 bp, synthetic construct
  misc_feature 1..20: note = chemically synthesized
  source 1..20: mol_type = other DNA
caaaggaattttggacccta

SEQ ID NO: 57397 - DNA, 20 bp, synthetic construct
  misc_feature 1..20: note = chemically synthesized
  source 1..20: mol_type = other DNA
tgcttttttataaaatgact

SEQ ID NO: 57398 - DNA, 20 bp, synthetic construct
  misc_feature 1..20: note = chemically synthesized
  source 1..20: mol_type = other DNA
gcttttttataaaatgactc

SEQ ID NO: 57399 - DNA, 20 bp, synthetic construct
  misc_feature 1..20: note = chemically synthesized
  source 1..20: mol_type = other DNA
tcaggctccactgaacatcc

SEQ ID NO: 57400 - DNA, 20 bp, synthetic construct
  misc_feature 1..20: note = chemically synthesized
  source 1..20: mol_type = other DNA
caggctccactgaacatccc

SEQ ID NO: 57401 - DNA, 20 bp, synthetic construct
  misc_feature 1..20: note = chemically synthesized
  source 1..20: mol_type = other DNA
aggctccactgaacatccca

SEQ ID NO: 57402 - DNA, 20 bp, synthetic construct
  misc_feature 1..20: note = chemically synthesized
  source 1..20: mol_type = other DNA
atcccagggccttgtcccta

SEQ ID NO: 57403 - DNA, 20 bp, synthetic construct
  misc_feature 1..20: note = chemically synthesized
  source 1..20: mol_type = other DNA
tcccagggccttgtccctac

SEQ ID NO: 57404 - DNA, 20 bp, synthetic construct
  misc_feature 1..20: note = chemically synthesized
  source 1..20: mol_type = other DNA
cttgtccctacaggtttccg

SEQ ID NO: 57405 - DNA, 20 bp, synthetic construct
  misc_feature 1..20: note = chemically synthesized
  source 1..20: mol_type = other DNA
ttgtccctacaggtttccgt

SEQ ID NO: 57406 - DNA, 20 bp, synthetic construct
  misc_feature 1..20: note = chemically synthesized
  source 1..20: mol_type = other DNA
tccctacaggtttccgtagg

SEQ ID NO: 57407 - DNA, 20 bp, synthetic construct
  misc_feature 1..20: note = chemically synthesized
  source 1..20: mol_type = other DNA
ctacaggtttccgtaggcag

SEQ ID NO: 57408 - DNA, 20 bp, synthetic construct
  misc_feature 1..20: note = chemically synthesized
  source 1..20: mol_type = other DNA
tccgtaggcagcagatgcat

SEQ ID NO: 57409 - DNA, 20 bp, synthetic construct
  misc_feature 1..20: note = chemically synthesized
  source 1..20: mol_type = other DNA
ggcagcagatgcattggcac

SEQ ID NO: 57410 - DNA, 20 bp, synthetic construct
  misc_feature 1..20: note = chemically synthesized
  source 1..20: mol_type = other DNA
cagatgcattggcacaagaa

SEQ ID NO: 57411 - DNA, 20 bp, synthetic construct
  misc_feature 1..20: note = chemically synthesized
  source 1..20: mol_type = other DNA
tgcattggcacaagaatggc

SEQ ID NO: 57412 - DNA, 20 bp, synthetic construct
  misc_feature 1..20: note = chemically synthesized
  source 1..20: mol_type = other DNA
attggcacaagaatggctgg

SEQ ID NO: 57413 - DNA, 20 bp, synthetic construct
  misc_feature 1..20: note = chemically synthesized
  source 1..20: mol_type = other DNA
ttggcacaagaatggctggc

SEQ ID NO: 57414 - DNA, 20 bp, synthetic construct
  misc_feature 1..20: note = chemically synthesized
  source 1..20: mol_type = other DNA
gcacaagaatggctggcagg

SEQ ID NO: 57415 - DNA, 20 bp, synthetic construct
  misc_feature 1..20: note = chemically synthesized
  source 1..20: mol_type = other DNA
atggctggcaggcagaccaa

SEQ ID NO: 57416 - DNA, 20 bp, synthetic construct
  misc_feature 1..20: note = chemically synthesized
  source 1..20: mol_type = other DNA
tggctggcaggcagaccaat

SEQ ID NO: 57417 - DNA, 20 bp, synthetic construct
  misc_feature 1..20: note = chemically synthesized
  source 1..20: mol_type = other DNA
gcagaccaatgggtttgatc

SEQ ID NO: 57418 - DNA, 20 bp, synthetic construct
  misc_feature 1..20: note = chemically synthesized
  source 1..20: mol_type = other DNA
cagaccaatgggtttgatcc

SEQ ID NO: 57419 - DNA, 20 bp, synthetic construct
  misc_feature 1..20: note = chemically synthesized
  source 1..20: mol_type = other DNA
tttgatccaggctctacccc

SEQ ID NO: 57420 - DNA, 20 bp, synthetic construct
  misc_feature 1..20: note = chemically synthesized
  source 1..20: mol_type = other DNA
tctacccctagctgtctgtg

SEQ ID NO: 57421 - DNA, 20 bp, synthetic construct
  misc_feature 1..20: note = chemically synthesized
  source 1..20: mol_type = other DNA
gtgtggtcccctctgaactt

SEQ ID NO: 57422 - DNA, 20 bp, synthetic construct
  misc_feature 1..20: note = chemically synthesized
  source 1..20: mol_type = other DNA
gtctcctcgtctttcaaatg

SEQ ID NO: 57423 - DNA, 20 bp, synthetic construct
  misc_feature 1..20: note = chemically synthesized
  source 1..20: mol_type = other DNA
cctcgtctttcaaatgaaga

SEQ ID NO: 57424 - DNA, 20 bp, synthetic construct
  misc_feature 1..20: note = chemically synthesized
  source 1..20: mol_type = other DNA
aatgaagatagacgtaccac

SEQ ID NO: 57425 - DNA, 20 bp, synthetic construct
  misc_feature 1..20: note = chemically synthesized
  source 1..20: mol_type = other DNA
atgaagatagacgtaccact

SEQ ID NO: 57426 - DNA, 20 bp, synthetic construct
  misc_feature 1..20: note = chemically synthesized
  source 1..20: mol_type = other DNA
tgaagatagacgtaccactg

SEQ ID NO: 57427 - DNA, 20 bp, synthetic construct
  misc_feature 1..20: note = chemically synthesized
  source 1..20: mol_type = other DNA
atagacgtaccactggggca

SEQ ID NO: 57428 - DNA, 20 bp, synthetic construct
  misc_feature 1..20: note = chemically synthesized
  source 1..20: mol_type = other DNA
acgtaccactggggcatggc

SEQ ID NO: 57429 - DNA, 20 bp, synthetic construct
  misc_feature 1..20: note = chemically synthesized
  source 1..20: mol_type = other DNA
cgtaccactggggcatggcc

SEQ ID NO: 57430 - DNA, 20 bp, synthetic construct
  misc_feature 1..20: note = chemically synthesized
  source 1..20: mol_type = other DNA
ctggggcatggccaggctta

SEQ ID NO: 57431 - DNA, 20 bp, synthetic construct
  misc_feature 1..20: note = chemically synthesized
  source 1..20: mol_type = other DNA
tggggcatggccaggcttaa

SEQ ID NO: 57432 - DNA, 20 bp, synthetic construct
  misc_feature 1..20: note = chemically synthesized
  source 1..20: mol_type = other DNA
ggggcatggccaggcttaaa

SEQ ID NO: 57433 - DNA, 20 bp, synthetic construct
  misc_feature 1..20: note = chemically synthesized
  source 1..20: mol_type = other DNA
ggcttaaagggaattctata

SEQ ID NO: 57434 - DNA, 20 bp, synthetic construct
  misc_feature 1..20: note = chemically synthesized
  source 1..20: mol_type = other DNA
taaagggaattctatacaga

SEQ ID NO: 57435 - DNA, 20 bp, synthetic construct
  misc_feature 1..20: note = chemically synthesized
  source 1..20: mol_type = other DNA
gggaattctatacagaaagc

SEQ ID NO: 57436 - DNA, 20 bp, synthetic construct
  misc_feature 1..20: note = chemically synthesized
  source 1..20: mol_type = other DNA
aattctatacagaaagccag

SEQ ID NO: 57437 - DNA, 20 bp, synthetic construct
  misc_feature 1..20: note = chemically synthesized
  source 1..20: mol_type = other DNA
aagccagtagttactgtgct

SEQ ID NO: 57438 - DNA, 20 bp, synthetic construct
  misc_feature 1..20: note = chemically synthesized
  source 1..20: mol_type = other DNA
tactgtgcttggtacccgat

SEQ ID NO: 57439 - DNA, 20 bp, synthetic construct
  misc_feature 1..20: note = chemically synthesized
  source 1..20: mol_type = other DNA
tgctgtccccttctgatttt

SEQ ID NO: 57440 - DNA, 20 bp, synthetic construct
  misc_feature 1..20: note = chemically synthesized
  source 1..20: mol_type = other DNA
ccccttctgattttcagcaa

SEQ ID NO: 57441 - DNA, 20 bp, synthetic construct
  misc_feature 1..20: note = chemically synthesized
  source 1..20: mol_type = other DNA
cccttctgattttcagcaat

SEQ ID NO: 57442 - DNA, 20 bp, synthetic construct
  misc_feature 1..20: note = chemically synthesized
  source 1..20: mol_type = other DNA
ttttcagcaatgggcctact

SEQ ID NO: 57443 - DNA, 20 bp, synthetic construct
  misc_feature 1..20: note = chemically synthesized
  source 1..20: mol_type = other DNA
agcaatgggcctactaagca

SEQ ID NO: 57444 - DNA, 20 bp, synthetic construct
  misc_feature 1..20: note = chemically synthesized
  source 1..20: mol_type = other DNA
ggcctactaagcacagtccc

SEQ ID NO: 57445 - DNA, 20 bp, synthetic construct
  misc_feature 1..20: note = chemically synthesized
  source 1..20: mol_type = other DNA
cacagtccccagtgtatatg

SEQ ID NO: 57446 - DNA, 20 bp, synthetic construct
  misc_feature 1..20: note = chemically synthesized
  source 1..20: mol_type = other DNA
agtccccagtgtatatgcag

SEQ ID NO: 57447 - DNA, 20 bp, synthetic construct
  misc_feature 1..20: note = chemically synthesized
  source 1..20: mol_type = other DNA
ccagtgtatatgcagtggcc

SEQ ID NO: 57448 - DNA, 20 bp, synthetic construct
  misc_feature 1..20: note = chemically synthesized
  source 1..20: mol_type = other DNA
atgcagtggcccagccctat

SEQ ID NO: 57449 - DNA, 20 bp, synthetic construct
  misc_feature 1..20: note = chemically synthesized
  source 1..20: mol_type = other DNA
tgcagtggcccagccctatc

SEQ ID NO: 57450 - DNA, 20 bp, synthetic construct
  misc_feature 1..20: note = chemically synthesized
  source 1..20: mol_type = other DNA
agtggcccagccctatcagg

SEQ ID NO: 57451 - DNA, 20 bp, synthetic construct
  misc_feature 1..20: note = chemically synthesized
  source 1..20: mol_type = other DNA
caggaagtgccattcccaaa

SEQ ID NO: 57452 - DNA, 20 bp, synthetic construct
  misc_feature 1..20: note = chemically synthesized
  source 1..20: mol_type = other DNA
aggaagtgccattcccaaaa

SEQ ID NO: 57453 - DNA, 20 bp, synthetic construct
  misc_feature 1..20: note = chemically synthesized
  source 1..20: mol_type = other DNA
ggaagtgccattcccaaaaa

SEQ ID NO: 57454 - DNA, 20 bp, synthetic construct
  misc_feature 1..20: note = chemically synthesized
  source 1..20: mol_type = other DNA
agtgccattcccaaaaaggg

SEQ ID NO: 57455 - DNA, 20 bp, synthetic construct
  misc_feature 1..20: note = chemically synthesized
  source 1..20: mol_type = other DNA
tcccaaaaagggtggctcac

SEQ ID NO: 57456 - DNA, 20 bp, synthetic construct
  misc_feature 1..20: note = chemically synthesized
  source 1..20: mol_type = other DNA
aaagggtggctcaccagctc

SEQ ID NO: 57457 - DNA, 20 bp, synthetic construct
  misc_feature 1..20: note = chemically synthesized
  source 1..20: mol_type = other DNA
gggtggctcaccagctccag

SEQ ID NO: 57458 - DNA, 20 bp, synthetic construct
  misc_feature 1..20: note = chemically synthesized
  source 1..20: mol_type = other DNA
ggtggctcaccagctccagc

SEQ ID NO: 57459 - DNA, 20 bp, synthetic construct
  misc_feature 1..20: note = chemically synthesized
  source 1..20: mol_type = other DNA
aggtcgccactcatcttcac

SEQ ID NO: 57460 - DNA, 20 bp, synthetic construct
  misc_feature 1..20: note = chemically synthesized
  source 1..20: mol_type = other DNA
ggtcgccactcatcttcacc

SEQ ID NO: 57461 - DNA, 20 bp, synthetic construct
  misc_feature 1..20: note = chemically synthesized
  source 1..20: mol_type = other DNA
cgccactcatcttcaccagg

SEQ ID NO: 57462 - DNA, 20 bp, synthetic construct
  misc_feature 1..20: note = chemically synthesized
  source 1..20: mol_type = other DNA
actcatcttcaccaggaagc

SEQ ID NO: 57463 - DNA, 20 bp, synthetic construct
  misc_feature 1..20: note = chemically synthesized
  source 1..20: mol_type = other DNA
ctcatcttcaccaggaagcc

SEQ ID NO: 57464 - DNA, 20 bp, synthetic construct
  misc_feature 1..20: note = chemically synthesized
  source 1..20: mol_type = other DNA
atcttcaccaggaagccagg

SEQ ID NO: 57465 - DNA, 20 bp, synthetic construct
  misc_feature 1..20: note = chemically synthesized
  source 1..20: mol_type = other DNA
ttcaccaggaagccaggaag

SEQ ID NO: 57466 - DNA, 20 bp, synthetic construct
  misc_feature 1..20: note = chemically synthesized
  source 1..20: mol_type = other DNA
tcaccaggaagccaggaaga

SEQ ID NO: 57467 - DNA, 20 bp, synthetic construct
  misc_feature 1..20: note = chemically synthesized
  source 1..20: mol_type = other DNA
ggaagccaggaagaaggcca

SEQ ID NO: 57468 - DNA, 20 bp, synthetic construct
  misc_feature 1..20: note = chemically synthesized
  source 1..20: mol_type = other DNA
agccaggaagaaggccatgg

SEQ ID NO: 57469 - DNA, 20 bp, synthetic construct
  misc_feature 1..20: note = chemically synthesized
  source 1..20: mol_type = other DNA
agaaggccatggaagacatg

SEQ ID NO: 57470 - DNA, 20 bp, synthetic construct
  misc_feature 1..20: note = chemically synthesized
  source 1..20: mol_type = other DNA
gaaggccatggaagacatgc

SEQ ID NO: 57471 - DNA, 20 bp, synthetic construct
  misc_feature 1..20: note = chemically synthesized
  source 1..20: mol_type = other DNA
atggaagacatgcaggatct

SEQ ID NO: 57472 - DNA, 20 bp, synthetic construct
  misc_feature 1..20: note = chemically synthesized
  source 1..20: mol_type = other DNA
aagacatgcaggatcttggt

SEQ ID NO: 57473 - DNA, 20 bp, synthetic construct
  misc_feature 1..20: note = chemically synthesized
  source 1..20: mol_type = other DNA
agacatgcaggatcttggtg

SEQ ID NO: 57474 - DNA, 20 bp, synthetic construct
  misc_feature 1..20: note = chemically synthesized
  source 1..20: mol_type = other DNA
ggatcttggtgaggtatccc

SEQ ID NO: 57475 - DNA, 20 bp, synthetic construct
  misc_feature 1..20: note = chemically synthesized
  source 1..20: mol_type = other DNA
tcttggtgaggtatccccgg

SEQ ID NO: 57476 - DNA, 20 bp, synthetic construct
  misc_feature 1..20: note = chemically synthesized
  source 1..20: mol_type = other DNA
cttggtgaggtatccccggc

SEQ ID NO: 57477 - DNA, 20 bp, synthetic construct
  misc_feature 1..20: note = chemically synthesized
  source 1..20: mol_type = other DNA
ggtgaggtatccccggcggg

SEQ ID NO: 57478 - DNA, 20 bp, synthetic construct
  misc_feature 1..20: note = chemically synthesized
  source 1..20: mol_type = other DNA
ggtatccccggcgggcagcc

SEQ ID NO: 57479 - DNA, 20 bp, synthetic construct
  misc_feature 1..20: note = chemically synthesized
  source 1..20: mol_type = other DNA
gtatccccggcgggcagcct

SEQ ID NO: 57480 - DNA, 20 bp, synthetic construct
  misc_feature 1..20: note = chemically synthesized
  source 1..20: mol_type = other DNA
cggcgggcagcctgggcctg

SEQ ID NO: 57481 - DNA, 20 bp, synthetic construct
  misc_feature 1..20: note = chemically synthesized
  source 1..20: mol_type = other DNA
ggcgggcagcctgggcctgc

SEQ ID NO: 57482 - DNA, 20 bp, synthetic construct
  misc_feature 1..20: note = chemically synthesized
  source 1..20: mol_type = other DNA
gggcagcctgggcctgcagg

SEQ ID NO: 57483 - DNA, 20 bp, synthetic construct
  misc_feature 1..20: note = chemically synthesized
  source 1..20: mol_type = other DNA
cagcctgggcctgcaggcgg

SEQ ID NO: 57484 - DNA, 20 bp, synthetic construct
  misc_feature 1..20: note = chemically synthesized
  source 1..20: mol_type = other DNA
agcctgggcctgcaggcggc

SEQ ID NO: 57485 - DNA, 20 bp, synthetic construct
  misc_feature 1..20: note = chemically synthesized
  source 1..20: mol_type = other DNA
ctgggcctgcaggcggcggg

SEQ ID NO: 57486 - DNA, 20 bp, synthetic construct
  misc_feature 1..20: note = chemically synthesized
  source 1..20: mol_type = other DNA
gggcagtgcgctctgactgc

SEQ ID NO: 57487 - DNA, 20 bp, synthetic construct
  misc_feature 1..20: note = chemically synthesized
  source 1..20: mol_type = other DNA
gcagtgcgctctgactgcga

SEQ ID NO: 57488 - DNA, 20 bp, synthetic construct
  misc_feature 1..20: note = chemically synthesized
  source 1..20: mol_type = other DNA
cagtgcgctctgactgcgag

SEQ ID NO: 57489 - DNA, 20 bp, synthetic construct
  misc_feature 1..20: note = chemically synthesized
  source 1..20: mol_type = other DNA
tgcgctctgactgcgagagg

SEQ ID NO: 57490 - DNA, 20 bp, synthetic construct
  misc_feature 1..20: note = chemically synthesized
  source 1..20: mol_type = other DNA
gcgctctgactgcgagaggt

SEQ ID NO: 57491 - DNA, 20 bp, synthetic construct
  misc_feature 1..20: note = chemically synthesized
  source 1..20: mol_type = other DNA
gagaggtgggtctcctcctt

SEQ ID NO: 57492 - DNA, 20 bp, synthetic construct
  misc_feature 1..20: note = chemically synthesized
  source 1..20: mol_type = other DNA
cctccttcagcaccaccacg

SEQ ID NO: 57493 - DNA, 20 bp, synthetic construct
  misc_feature 1..20: note = chemically synthesized
  source 1..20: mol_type = other DNA
ctccttcagcaccaccacgt

SEQ ID NO: 57494 - DNA, 20 bp, synthetic construct
  misc_feature 1..20: note = chemically synthesized
  source 1..20: mol_type = other DNA
cagcaccaccacgtaggtgc

SEQ ID NO: 57495 - DNA, 20 bp, synthetic construct
  misc_feature 1..20: note = chemically synthesized
  source 1..20: mol_type = other DNA
agcaccaccacgtaggtgcc

SEQ ID NO: 57496 - DNA, 20 bp, synthetic construct
  misc_feature 1..20: note = chemically synthesized
  source 1..20: mol_type = other DNA
taggtgccaggcaacctcca

SEQ ID NO: 57497 - DNA, 20 bp, synthetic construct
  misc_feature 1..20: note = chemically synthesized
  source 1..20: mol_type = other DNA
caggcaacctccacggatcc

SEQ ID NO: 57498 - DNA, 20 bp, synthetic construct
  misc_feature 1..20: note = chemically synthesized
  source 1..20: mol_type = other DNA
cacggatcctggccccatgc

SEQ ID NO: 57499 - DNA, 20 bp, synthetic construct
  misc_feature 1..20: note = chemically synthesized
  source 1..20: mol_type = other DNA
acggatcctggccccatgca

SEQ ID NO: 57500 - DNA, 20 bp, synthetic construct
  misc_feature 1..20: note = chemically synthesized
  source 1..20: mol_type = other DNA
ggatcctggccccatgcaag

SEQ ID NO: 57501 - DNA, 20 bp, synthetic construct
  misc_feature 1..20: note = chemically synthesized
  source 1..20: mol_type = other DNA
gatcctggccccatgcaagg

SEQ ID NO: 57502 - DNA, 20 bp, synthetic construct
  misc_feature 1..20: note = chemically synthesized
  source 1..20: mol_type = other DNA
caaggaggaacatgatgaca

SEQ ID NO: 57503 - DNA, 20 bp, synthetic construct
  misc_feature 1..20: note = chemically synthesized
  source 1..20: mol_type = other DNA
ggaggaacatgatgacatgg

SEQ ID NO: 57504 - DNA, 20 bp, synthetic construct
  misc_feature 1..20: note = chemically synthesized
  source 1..20: mol_type = other DNA
atgatgacatggaagaaacc

SEQ ID NO: 57505 - DNA, 20 bp, synthetic construct
  misc_feature 1..20: note = chemically synthesized
  source 1..20: mol_type = other DNA
ggaagaaacccagcaaaccc

SEQ ID NO: 57506 - DNA, 20 bp, synthetic construct
  misc_feature 1..20: note = chemically synthesized
  source 1..20: mol_type = other DNA
gaagaaacccagcaaaccct

SEQ ID NO: 57507 - DNA, 20 bp, synthetic construct
  misc_feature 1..20: note = chemically synthesized
  source 1..20: mol_type = other DNA
ctacttacaaattacaacaa

SEQ ID NO: 57508 - DNA, 20 bp, synthetic construct
  misc_feature 1..20: note = chemically synthesized
  source 1..20: mol_type = other DNA
acttacaaattacaacaaaa

SEQ ID NO: 57509 - DNA, 20 bp, synthetic construct
  misc_feature 1..20: note = chemically synthesized
  source 1..20: mol_type = other DNA
ttacaacaaaagagacacaa

SEQ ID NO: 57510 - DNA, 20 bp, synthetic construct
  misc_feature 1..20: note = chemically synthesized
  source 1..20: mol_type = other DNA
acaacaaaagagacacaaca

SEQ ID NO: 57511 - DNA, 20 bp, synthetic construct
  misc_feature 1..20: note = chemically synthesized
  source 1..20: mol_type = other DNA
aaaagagacacaacagagta

SEQ ID NO: 57512 - DNA, 20 bp, synthetic construct
  misc_feature 1..20: note = chemically synthesized
  source 1..20: mol_type = other DNA
agagacacaacagagtatag

SEQ ID NO: 57513 - DNA, 20 bp, synthetic construct
  misc_feature 1..20: note = chemically synthesized
  source 1..20: mol_type = other DNA
acagagtatagtagatgata

SEQ ID NO: 57514 - DNA, 20 bp, synthetic construct
  misc_feature 1..20: note = chemically synthesized
  source 1..20: mol_type = other DNA
gagtatagtagatgataaag

SEQ ID NO: 57515 - DNA, 20 bp, synthetic construct
  misc_feature 1..20: note = chemically synthesized
  source 1..20: mol_type = other DNA
gataaagaagttaccaaatg

SEQ ID NO: 57516 - DNA, 20 bp, synthetic construct
  misc_feature 1..20: note = chemically synthesized
  source 1..20: mol_type = other DNA
gttaccaaatgcggaccaaa

SEQ ID NO: 57517 - DNA, 20 bp, synthetic construct
  misc_feature 1..20: note = chemically synthesized
  source 1..20: mol_type = other DNA
gcggaccaaaaagcaaatta

SEQ ID NO: 57518 - DNA, 20 bp, synthetic construct
  misc_feature 1..20: note = chemically synthesized
  source 1..20: mol_type = other DNA
agcaaattaaagaactcata

SEQ ID NO: 57519 - DNA, 20 bp, synthetic construct
  misc_feature 1..20: note = chemically synthesized
  source 1..20: mol_type = other DNA
gcaaattaaagaactcatat

SEQ ID NO: 57520 - DNA, 20 bp, synthetic construct
  misc_feature 1..20: note = chemically synthesized
  source 1..20: mol_type = other DNA
gccaactattattattcaca

SEQ ID NO: 57521 - DNA, 20 bp, synthetic construct
  misc_feature 1..20: note = chemically synthesized
  source 1..20: mol_type = other DNA
acactttcaaatgtgccatt

SEQ ID NO: 57522 - DNA, 20 bp, synthetic construct
  misc_feature 1..20: note = chemically synthesized
  source 1..20: mol_type = other DNA
cactttcaaatgtgccattc

SEQ ID NO: 57523 - DNA, 20 bp, synthetic construct
  misc_feature 1..20: note = chemically synthesized
  source 1..20: mol_type = other DNA
atgtgccattcaggcaaaaa

SEQ ID NO: 57524 - DNA, 20 bp, synthetic construct
  misc_feature 1..20: note = chemically synthesized
  source 1..20: mol_type = other DNA
tgtgccattcaggcaaaaat

SEQ ID NO: 57525 - DNA, 20 bp, synthetic construct
  misc_feature 1..20: note = chemically synthesized
  source 1..20: mol_type = other DNA
tcaggcaaaaatgggaacta

SEQ ID NO: 57526 - DNA, 20 bp, synthetic construct
  misc_feature 1..20: note = chemically synthesized
  source 1..20: mol_type = other DNA
caggcaaaaatgggaactac

SEQ ID NO: 57527 - DNA, 20 bp, synthetic construct
  misc_feature 1..20: note = chemically synthesized
  source 1..20: mol_type = other DNA
ctacgggccacactcgacaa

SEQ ID NO: 57528 - DNA, 20 bp, synthetic construct
  misc_feature 1..20: note = chemically synthesized
  source 1..20: mol_type = other DNA
tacgggccacactcgacaac

SEQ ID NO: 57529 - DNA, 20 bp, synthetic construct
  misc_feature 1..20: note = chemically synthesized
  source 1..20: mol_type = other DNA
ttttcctctgtacctgcacc

SEQ ID NO: 57530 - DNA, 20 bp, synthetic construct
  misc_feature 1..20: note = chemically synthesized
  source 1..20: mol_type = other DNA
tacctgcacccagctctcta

SEQ ID NO: 57531 - DNA, 20 bp, synthetic construct
  misc_feature 1..20: note = chemically synthesized
  source 1..20: mol_type = other DNA
acctgcacccagctctctac

SEQ ID NO: 57532 - DNA, 20 bp, synthetic construct
  misc_feature 1..20: note = chemically synthesized
  source 1..20: mol_type = other DNA
cacccagctctctacgggcc

SEQ ID NO: 57533 - DNA, 20 bp, synthetic construct
  misc_feature 1..20: note = chemically synthesized
  source 1..20: mol_type = other DNA
tctacgggcctggtcgctcc

SEQ ID NO: 57534 - DNA, 20 bp, synthetic construct
  misc_feature 1..20: note = chemically synthesized
  source 1..20: mol_type = other DNA
acgggcctggtcgctcctgg

SEQ ID NO: 57535 - DNA, 20 bp, synthetic construct
  misc_feature 1..20: note = chemically synthesized
  source 1..20: mol_type = other DNA
gctcctggtggccctgccca

SEQ ID NO: 57536 - DNA, 20 bp, synthetic construct
  misc_feature 1..20: note = chemically synthesized
  source 1..20: mol_type = other DNA
ctcctggtggccctgcccaa

SEQ ID NO: 57537 - DNA, 20 bp, synthetic construct
  misc_feature 1..20: note = chemically synthesized
  source 1..20: mol_type = other DNA
ccaccccctcccccatgccc

SEQ ID NO: 57538 - DNA, 20 bp, synthetic construct
  misc_feature 1..20: note = chemically synthesized
  source 1..20: mol_type = other DNA
cccctcccccatgccccagt

SEQ ID NO: 57539 - DNA, 20 bp, synthetic construct
  misc_feature 1..20: note = chemically synthesized
  source 1..20: mol_type = other DNA
tgccccagtcagaataaatt

SEQ ID NO: 57540 - DNA, 20 bp, synthetic construct
  misc_feature 1..20: note = chemically synthesized
  source 1..20: mol_type = other DNA
gccccagtcagaataaattg

SEQ ID NO: 57541 - DNA, 20 bp, synthetic construct
  misc_feature 1..20: note = chemically synthesized
  source 1..20: mol_type = other DNA
ccccagtcagaataaattga

SEQ ID NO: 57542 - DNA, 20 bp, synthetic construct
  misc_feature 1..20: note = chemically synthesized
  source 1..20: mol_type = other DNA
taaattgagggaaaaaatca

SEQ ID NO: 57543 - DNA, 20 bp, synthetic construct
  misc_feature 1..20: note = chemically synthesized
  source 1..20: mol_type = other DNA
aaattgagggaaaaaatcat

SEQ ID NO: 57544 - DNA, 20 bp, synthetic construct
  misc_feature 1..20: note = chemically synthesized
  source 1..20: mol_type = other DNA
agggaaaaaatcatgggctt

SEQ ID NO: 57545 - DNA, 20 bp, synthetic construct
  misc_feature 1..20: note = chemically synthesized
  source 1..20: mol_type = other DNA
ggaaaaaatcatgggctttg

SEQ ID NO: 57546 - DNA, 20 bp, synthetic construct
  misc_feature 1..20: note = chemically synthesized
  source 1..20: mol_type = other DNA
aaaatcatgggctttggagc

SEQ ID NO: 57547 - DNA, 20 bp, synthetic construct
  misc_feature 1..20: note = chemically synthesized
  source 1..20: mol_type = other DNA
aaatcatgggctttggagcc

SEQ ID NO: 57548 - DNA, 20 bp, synthetic construct
  misc_feature 1..20: note = chemically synthesized
  source 1..20: mol_type = other DNA
gctttggagccaggaaaccg

SEQ ID NO: 57549 - DNA, 20 bp, synthetic construct
  misc_feature 1..20: note = chemically synthesized
  source 1..20: mol_type = other DNA
gaaaccgtggacctgaattc

SEQ ID NO: 57550 - DNA, 20 bp, synthetic construct
  misc_feature 1..20: note = chemically synthesized
  source 1..20: mol_type = other DNA
attccagctccaatatttac

SEQ ID NO: 57551 - DNA, 20 bp, synthetic construct
  misc_feature 1..20: note = chemically synthesized
  source 1..20: mol_type = other DNA
tccaatatttactggttgtg

SEQ ID NO: 57552 - DNA, 20 bp, synthetic construct
  misc_feature 1..20: note = chemically synthesized
  source 1..20: mol_type = other DNA
tttactggttgtgcagccat

SEQ ID NO: 57553 - DNA, 20 bp, synthetic construct
  misc_feature 1..20: note = chemically synthesized
  source 1..20: mol_type = other DNA
ctggttgtgcagccatgagc

SEQ ID NO: 57554 - DNA, 20 bp, synthetic construct
  misc_feature 1..20: note = chemically synthesized
  source 1..20: mol_type = other DNA
gagcaagtcactcaacctct

SEQ ID NO: 57555 - DNA, 20 bp, synthetic construct
  misc_feature 1..20: note = chemically synthesized
  source 1..20: mol_type = other DNA
gcaagtcactcaacctctcg

SEQ ID NO: 57556 - DNA, 20 bp, synthetic construct
  misc_feature 1..20: note = chemically synthesized
  source 1..20: mol_type = other DNA
cactcaacctctcggagcct

SEQ ID NO: 57557 - DNA, 20 bp, synthetic construct
  misc_feature 1..20: note = chemically synthesized
  source 1..20: mol_type = other DNA
cagatacctctgctgtattg

SEQ ID NO: 57558 - DNA, 20 bp, synthetic construct
  misc_feature 1..20: note = chemically synthesized
  source 1..20: mol_type = other DNA
gatacctctgctgtattgta

SEQ ID NO: 57559 - DNA, 20 bp, synthetic construct
  misc_feature 1..20: note = chemically synthesized
  source 1..20: mol_type = other DNA
ctgctgtattgtagagacca

SEQ ID NO: 57560 - DNA, 20 bp, synthetic construct
  misc_feature 1..20: note = chemically synthesized
  source 1..20: mol_type = other DNA
agaccacagtacctatgaca

SEQ ID NO: 57561 - DNA, 20 bp, synthetic construct
  misc_feature 1..20: note = chemically synthesized
  source 1..20: mol_type = other DNA
gaccacagtacctatgacat

SEQ ID NO: 57562 - DNA, 20 bp, synthetic construct
  misc_feature 1..20: note = chemically synthesized
  source 1..20: mol_type = other DNA
tacctatgacataggcctgc

SEQ ID NO: 57563 - DNA, 20 bp, synthetic construct
  misc_feature 1..20: note = chemically synthesized
  source 1..20: mol_type = other DNA
acctatgacataggcctgct

SEQ ID NO: 57564 - DNA, 20 bp, synthetic construct
  misc_feature 1..20: note = chemically synthesized
  source 1..20: mol_type = other DNA
atgacataggcctgctggga

SEQ ID NO: 57565 - DNA, 20 bp, synthetic construct
  misc_feature 1..20: note = chemically synthesized
  source 1..20: mol_type = other DNA
ataggcctgctgggaaagtc

SEQ ID NO: 57566 - DNA, 20 bp, synthetic construct
  misc_feature 1..20: note = chemically synthesized
  source 1..20: mol_type = other DNA
aggcctgctgggaaagtcaa

SEQ ID NO: 57567 - DNA, 20 bp, synthetic construct
  misc_feature 1..20: note = chemically synthesized
  source 1..20: mol_type = other DNA
gctgggaaagtcaagagtga

SEQ ID NO: 57568 - DNA, 20 bp, synthetic construct
  misc_feature 1..20: note = chemically synthesized
  source 1..20: mol_type = other DNA
ggttatataaatctcccatc

SEQ ID NO: 57569 - DNA, 20 bp, synthetic construct
  misc_feature 1..20: note = chemically synthesized
  source 1..20: mol_type = other DNA
atccagatgctctacaaatg

SEQ ID NO: 57570 - DNA, 20 bp, synthetic construct
  misc_feature 1..20: note = chemically synthesized
  source 1..20: mol_type = other DNA
tccagatgctctacaaatgc

SEQ ID NO: 57571 - DNA, 20 bp, synthetic construct
  misc_feature 1..20: note = chemically synthesized
  source 1..20: mol_type = other DNA
agatgctctacaaatgcagg

SEQ ID NO: 57572 - DNA, 20 bp, synthetic construct
  misc_feature 1..20: note = chemically synthesized
  source 1..20: mol_type = other DNA
tgctctacaaatgcaggcag

SEQ ID NO: 57573 - DNA, 20 bp, synthetic construct
  misc_feature 1..20: note = chemically synthesized
  source 1..20: mol_type = other DNA
gctctacaaatgcaggcaga

SEQ ID NO: 57574 - DNA, 20 bp, synthetic construct
  misc_feature 1..20: note = chemically synthesized
  source 1..20: mol_type = other DNA
ctctacaaatgcaggcagaa

SEQ ID NO: 57575 - DNA, 20 bp, synthetic construct
  misc_feature 1..20: note = chemically synthesized
  source 1..20: mol_type = other DNA
tgcaggcagaagggatgact

SEQ ID NO: 57576 - DNA, 20 bp, synthetic construct
  misc_feature 1..20: note = chemically synthesized
  source 1..20: mol_type = other DNA
ggcagaagggatgactaagt

SEQ ID NO: 57577 - DNA, 20 bp, synthetic construct
  misc_feature 1..20: note = chemically synthesized
  source 1..20: mol_type = other DNA
aagggatgactaagtgagca

SEQ ID NO: 57578 - DNA, 20 bp, synthetic construct
  misc_feature 1..20: note = chemically synthesized
  source 1..20: mol_type = other DNA
agggatgactaagtgagcaa

SEQ ID NO: 57579 - DNA, 20 bp, synthetic construct
  misc_feature 1..20: note = chemically synthesized
  source 1..20: mol_type = other DNA
agcaaaggcaacacttctta

SEQ ID NO: 57580 - DNA, 20 bp, synthetic construct
  misc_feature 1..20: note = chemically synthesized
  source 1..20: mol_type = other DNA
caaaggcaacacttcttaaa

SEQ ID NO: 57581 - DNA, 20 bp, synthetic construct
  misc_feature 1..20: note = chemically synthesized
  source 1..20: mol_type = other DNA
aaggcaacacttcttaaaga

SEQ ID NO: 57582 - DNA, 20 bp, synthetic construct
  misc_feature 1..20: note = chemically synthesized
  source 1..20: mol_type = other DNA
ggcaacacttcttaaagaga

SEQ ID NO: 57583 - DNA, 20 bp, synthetic construct
  misc_feature 1..20: note = chemically synthesized
  source 1..20: mol_type = other DNA
cacttcttaaagagagagaa

SEQ ID NO: 57584 - DNA, 20 bp, synthetic construct
  misc_feature 1..20: note = chemically synthesized
  source 1..20: mol_type = other DNA
cttaaagagagagaaaagtc

SEQ ID NO: 57585 - DNA, 20 bp, synthetic construct
  misc_feature 1..20: note = chemically synthesized
  source 1..20: mol_type = other DNA
ttaaagagagagaaaagtca

SEQ ID NO: 57586 - DNA, 20 bp, synthetic construct
  misc_feature 1..20: note = chemically synthesized
  source 1..20: mol_type = other DNA
aaaagtcaaggccactgtct

SEQ ID NO: 57587 - DNA, 20 bp, synthetic construct
  misc_feature 1..20: note = chemically synthesized
  source 1..20: mol_type = other DNA
tccttttgtgttgctatata

SEQ ID NO: 57588 - DNA, 20 bp, synthetic construct
  misc_feature 1..20: note = chemically synthesized
  source 1..20: mol_type = other DNA
ccttttgtgttgctatataa

SEQ ID NO: 57589 - DNA, 20 bp, synthetic construct
  misc_feature 1..20: note = chemically synthesized
  source 1..20: mol_type = other DNA
gctatataaaggaatacctg

SEQ ID NO: 57590 - DNA, 20 bp, synthetic construct
  misc_feature 1..20: note = chemically synthesized
  source 1..20: mol_type = other DNA
ctatataaaggaatacctga

SEQ ID NO: 57591 - DNA, 20 bp, synthetic construct
  misc_feature 1..20: note = chemically synthesized
  source 1..20: mol_type = other DNA
ataaaggaatacctgaaggt

SEQ ID NO: 57592 - DNA, 20 bp, synthetic construct
  misc_feature 1..20: note = chemically synthesized
  source 1..20: mol_type = other DNA
cctgaaggtgagtaatttac

SEQ ID NO: 57593 - DNA, 20 bp, synthetic construct
  misc_feature 1..20: note = chemically synthesized
  source 1..20: mol_type = other DNA
ctgaaggtgagtaatttaca

SEQ ID NO: 57594 - DNA, 20 bp, synthetic construct
  misc_feature 1..20: note = chemically synthesized
  source 1..20: mol_type = other DNA
ggtgagtaatttacaaggaa

SEQ ID NO: 57595 - DNA, 20 bp, synthetic construct
  misc_feature 1..20: note = chemically synthesized
  source 1..20: mol_type = other DNA
gtgagtaatttacaaggaaa

SEQ ID NO: 57596 - DNA, 20 bp, synthetic construct
  misc_feature 1..20: note = chemically synthesized
  source 1..20: mol_type = other DNA
tgagtaatttacaaggaaaa

SEQ ID NO: 57597 - DNA, 20 bp, synthetic construct
  misc_feature 1..20: note = chemically synthesized
  source 1..20: mol_type = other DNA
acaaggaaaagggatttatt

SEQ ID NO: 57598 - DNA, 20 bp, synthetic construct
  misc_feature 1..20: note = chemically synthesized
  source 1..20: mol_type = other DNA
tattcagctcatgattctgc

SEQ ID NO: 57599 - DNA, 20 bp, synthetic construct
  misc_feature 1..20: note = chemically synthesized
  source 1..20: mol_type = other DNA
tcatgattctgcaagctctc

SEQ ID NO: 57600 - DNA, 20 bp, synthetic construct
  misc_feature 1..20: note = chemically synthesized
  source 1..20: mol_type = other DNA
catgattctgcaagctctcc

SEQ ID NO: 57601 - DNA, 20 bp, synthetic construct
  misc_feature 1..20: note = chemically synthesized
  source 1..20: mol_type = other DNA
gattctgcaagctctccagg

SEQ ID NO: 57602 - DNA, 20 bp, synthetic construct
  misc_feature 1..20: note = chemically synthesized
  source 1..20: mol_type = other DNA
tgcaagctctccaggaagca

SEQ ID NO: 57603 - DNA, 20 bp, synthetic construct
  misc_feature 1..20: note = chemically synthesized
  source 1..20: mol_type = other DNA
ctctccaggaagcatggcac

SEQ ID NO: 57604 - DNA, 20 bp, synthetic construct
  misc_feature 1..20: note = chemically synthesized
  source 1..20: mol_type = other DNA
atggcaccagcatctgcttc

SEQ ID NO: 57605 - DNA, 20 bp, synthetic construct
  misc_feature 1..20: note = chemically synthesized
  source 1..20: mol_type = other DNA
caccagcatctgcttctggt

SEQ ID NO: 57606 - DNA, 20 bp, synthetic construct
  misc_feature 1..20: note = chemically synthesized
  source 1..20: mol_type = other DNA
accagcatctgcttctggtg

SEQ ID NO: 57607 - DNA, 20 bp, synthetic construct
  misc_feature 1..20: note = chemically synthesized
  source 1..20: mol_type = other DNA
ccagcatctgcttctggtga

SEQ ID NO: 57608 - DNA, 20 bp, synthetic construct
  misc_feature 1..20: note = chemically synthesized
  source 1..20: mol_type = other DNA
ctgcttctggtgagggcctt

SEQ ID NO: 57609 - DNA, 20 bp, synthetic construct
  misc_feature 1..20: note = chemically synthesized
  source 1..20: mol_type = other DNA
ccttaagctgctttcactga

SEQ ID NO: 57610 - DNA, 20 bp, synthetic construct
  misc_feature 1..20: note = chemically synthesized
  source 1..20: mol_type = other DNA
taagctgctttcactgatgg

SEQ ID NO: 57611 - DNA, 20 bp, synthetic construct
  misc_feature 1..20: note = chemically synthesized
  source 1..20: mol_type = other DNA
gctgctttcactgatggcag

SEQ ID NO: 57612 - DNA, 20 bp, synthetic construct
  misc_feature 1..20: note = chemically synthesized
  source 1..20: mol_type = other DNA
ctgctttcactgatggcaga

SEQ ID NO: 57613 - DNA, 20 bp, synthetic construct
  misc_feature 1..20: note = chemically synthesized
  source 1..20: mol_type = other DNA
ttcactgatggcagaaggtg

SEQ ID NO: 57614 - DNA, 20 bp, synthetic construct
  misc_feature 1..20: note = chemically synthesized
  source 1..20: mol_type = other DNA
tcactgatggcagaaggtga

SEQ ID NO: 57615 - DNA, 20 bp, synthetic construct
  misc_feature 1..20: note = chemically synthesized
  source 1..20: mol_type = other DNA
cactgatggcagaaggtgaa

SEQ ID NO: 57616 - DNA, 20 bp, synthetic construct
  misc_feature 1..20: note = chemically synthesized
  source 1..20: mol_type = other DNA
actgatggcagaaggtgaag

SEQ ID NO: 57617 - DNA, 20 bp, synthetic construct
  misc_feature 1..20: note = chemically synthesized
  source 1..20: mol_type = other DNA
tgatggcagaaggtgaaggg

SEQ ID NO: 57618 - DNA, 20 bp, synthetic construct
  misc_feature 1..20: note = chemically synthesized
  source 1..20: mol_type = other DNA
tgaaggggagcctacatgtg

SEQ ID NO: 57619 - DNA, 20 bp, synthetic construct
  misc_feature 1..20: note = chemically synthesized
  source 1..20: mol_type = other DNA
aaggggagcctacatgtgca

SEQ ID NO: 57620 - DNA, 20 bp, synthetic construct
  misc_feature 1..20: note = chemically synthesized
  source 1..20: mol_type = other DNA
atgtgcagagatcaatcaca

SEQ ID NO: 57621 - DNA, 20 bp, synthetic construct
  misc_feature 1..20: note = chemically synthesized
  source 1..20: mol_type = other DNA
gcagagatcaatcacatggc

SEQ ID NO: 57622 - DNA, 20 bp, synthetic construct
  misc_feature 1..20: note = chemically synthesized
  source 1..20: mol_type = other DNA
agagatcaatcacatggcaa

SEQ ID NO: 57623 - DNA, 20 bp, synthetic construct
  misc_feature 1..20: note = chemically synthesized
  source 1..20: mol_type = other DNA
gatcaatcacatggcaagag

SEQ ID NO: 57624 - DNA, 20 bp, synthetic construct
  misc_feature 1..20: note = chemically synthesized
  source 1..20: mol_type = other DNA
caatcacatggcaagagaag

SEQ ID NO: 57625 - DNA, 20 bp, synthetic construct
  misc_feature 1..20: note = chemically synthesized
  source 1..20: mol_type = other DNA
cacatggcaagagaagaagc

SEQ ID NO: 57626 - DNA, 20 bp, synthetic construct
  misc_feature 1..20: note = chemically synthesized
  source 1..20: mol_type = other DNA
catggcaagagaagaagcaa

SEQ ID NO: 57627 - DNA, 20 bp, synthetic construct
  misc_feature 1..20: note = chemically synthesized
  source 1..20: mol_type = other DNA
tggcaagagaagaagcaaga

SEQ ID NO: 57628 - DNA, 20 bp, synthetic construct
  misc_feature 1..20: note = chemically synthesized
  source 1..20: mol_type = other DNA
caagagaagaagcaagagag

SEQ ID NO: 57629 - DNA, 20 bp, synthetic construct
  misc_feature 1..20: note = chemically synthesized
  source 1..20: mol_type = other DNA
agagaagaagcaagagagaa

SEQ ID NO: 57630 - DNA, 20 bp, synthetic construct
  misc_feature 1..20: note = chemically synthesized
  source 1..20: mol_type = other DNA
agaagaagcaagagagaaga

SEQ ID NO: 57631 - DNA, 20 bp, synthetic construct
  misc_feature 1..20: note = chemically synthesized
  source 1..20: mol_type = other DNA
gaagaagcaagagagaagag

SEQ ID NO: 57632 - DNA, 20 bp, synthetic construct
  misc_feature 1..20: note = chemically synthesized
  source 1..20: mol_type = other DNA
aagaagcaagagagaagaga

SEQ ID NO: 57633 - DNA, 20 bp, synthetic construct
  misc_feature 1..20: note = chemically synthesized
  source 1..20: mol_type = other DNA
gaagcaagagagaagagagg

SEQ ID NO: 57634 - DNA, 20 bp, synthetic construct
  misc_feature 1..20: note = chemically synthesized
  source 1..20: mol_type = other DNA
aagcaagagagaagagaggg

SEQ ID NO: 57635 - DNA, 20 bp, synthetic construct
  misc_feature 1..20: note = chemically synthesized
  source 1..20: mol_type = other DNA
agagaagagagggaggtgcc

SEQ ID NO: 57636 - DNA, 20 bp, synthetic construct
  misc_feature 1..20: note = chemically synthesized
  source 1..20: mol_type = other DNA
gccaagctctttttaataat

SEQ ID NO: 57637 - DNA, 20 bp, synthetic construct
  misc_feature 1..20: note = chemically synthesized
  source 1..20: mol_type = other DNA
ctttttaataatcagccttc

SEQ ID NO: 57638 - DNA, 20 bp, synthetic construct
  misc_feature 1..20: note = chemically synthesized
  source 1..20: mol_type = other DNA
tttttaataatcagccttca

SEQ ID NO: 57639 - DNA, 20 bp, synthetic construct
  misc_feature 1..20: note = chemically synthesized
  source 1..20: mol_type = other DNA
ttttaataatcagccttcaa

SEQ ID NO: 57640 - DNA, 20 bp, synthetic construct
  misc_feature 1..20: note = chemically synthesized
  source 1..20: mol_type = other DNA
tcagccttcaagggaaatca

SEQ ID NO: 57641 - DNA, 20 bp, synthetic construct
  misc_feature 1..20: note = chemically synthesized
  source 1..20: mol_type = other DNA
gccttcaagggaaatcatag

SEQ ID NO: 57642 - DNA, 20 bp, synthetic construct
  misc_feature 1..20: note = chemically synthesized
  source 1..20: mol_type = other DNA
ccttcaagggaaatcatagc

SEQ ID NO: 57643 - DNA, 20 bp, synthetic construct
  misc_feature 1..20: note = chemically synthesized
  source 1..20: mol_type = other DNA
ttcaagggaaatcatagcgg

SEQ ID NO: 57644 - DNA, 20 bp, synthetic construct
  misc_feature 1..20: note = chemically synthesized
  source 1..20: mol_type = other DNA
gagaacttactcattatcac

SEQ ID NO: 57645 - DNA, 20 bp, synthetic construct
  misc_feature 1..20: note = chemically synthesized
  source 1..20: mol_type = other DNA
agaacttactcattatcaca

SEQ ID NO: 57646 - DNA, 20 bp, synthetic construct
  misc_feature 1..20: note = chemically synthesized
  source 1..20: mol_type = other DNA
cttactcattatcacaagga

SEQ ID NO: 57647 - DNA, 20 bp, synthetic construct
  misc_feature 1..20: note = chemically synthesized
  source 1..20: mol_type = other DNA
attatcacaaggacggcacc

SEQ ID NO: 57648 - DNA, 20 bp, synthetic construct
  misc_feature 1..20: note = chemically synthesized
  source 1..20: mol_type = other DNA
ggacggcaccaagcctttca

SEQ ID NO: 57649 - DNA, 20 bp, synthetic construct
  misc_feature 1..20: note = chemically synthesized
  source 1..20: mol_type = other DNA
gacggcaccaagcctttcac

SEQ ID NO: 57650 - DNA, 20 bp, synthetic construct
  misc_feature 1..20: note = chemically synthesized
  source 1..20: mol_type = other DNA
acggcaccaagcctttcaca

SEQ ID NO: 57651 - DNA, 20 bp, synthetic construct
  misc_feature 1..20: note = chemically synthesized
  source 1..20: mol_type = other DNA
cggcaccaagcctttcacag

SEQ ID NO: 57652 - DNA, 20 bp, synthetic construct
  misc_feature 1..20: note = chemically synthesized
  source 1..20: mol_type = other DNA
atgacccaaacacctcccat

SEQ ID NO: 57653 - DNA, 20 bp, synthetic construct
  misc_feature 1..20: note = chemically synthesized
  source 1..20: mol_type = other DNA
tgacccaaacacctcccatt

SEQ ID NO: 57654 - DNA, 20 bp, synthetic construct
  misc_feature 1..20: note = chemically synthesized
  source 1..20: mol_type = other DNA
taggccccacttccaacact

SEQ ID NO: 57655 - DNA, 20 bp, synthetic construct
  misc_feature 1..20: note = chemically synthesized
  source 1..20: mol_type = other DNA
aggccccacttccaacactg

SEQ ID NO: 57656 - DNA, 20 bp, synthetic construct
  misc_feature 1..20: note = chemically synthesized
  source 1..20: mol_type = other DNA
tgaggaccaaatttccacat

SEQ ID NO: 57657 - DNA, 20 bp, synthetic construct
  misc_feature 1..20: note = chemically synthesized
  source 1..20: mol_type = other DNA
ccaaatttccacatgagatt

SEQ ID NO: 57658 - DNA, 20 bp, synthetic construct
  misc_feature 1..20: note = chemically synthesized
  source 1..20: mol_type = other DNA
aaatttccacatgagatttg

SEQ ID NO: 57659 - DNA, 20 bp, synthetic construct
  misc_feature 1..20: note = chemically synthesized
  source 1..20: mol_type = other DNA
aatttccacatgagatttgg

SEQ ID NO: 57660 - DNA, 20 bp, synthetic construct
  misc_feature 1..20: note = chemically synthesized
  source 1..20: mol_type = other DNA
atttccacatgagatttgga

SEQ ID NO: 57661 - DNA, 20 bp, synthetic construct
  misc_feature 1..20: note = chemically synthesized
  source 1..20: mol_type = other DNA
tttccacatgagatttggag

SEQ ID NO: 57662 - DNA, 20 bp, synthetic construct
  misc_feature 1..20: note = chemically synthesized
  source 1..20: mol_type = other DNA
tggaggggacaaacaaatta

SEQ ID NO: 57663 - DNA, 20 bp, synthetic construct
  misc_feature 1..20: note = chemically synthesized
  source 1..20: mol_type = other DNA
aggggacaaacaaattatag

SEQ ID NO: 57664 - DNA, 20 bp, synthetic construct
  misc_feature 1..20: note = chemically synthesized
  source 1..20: mol_type = other DNA
attatagcagccactatcta

SEQ ID NO: 57665 - DNA, 20 bp, synthetic construct
  misc_feature 1..20: note = chemically synthesized
  source 1..20: mol_type = other DNA
actatctatggtgatttgtt

SEQ ID NO: 57666 - DNA, 20 bp, synthetic construct
  misc_feature 1..20: note = chemically synthesized
  source 1..20: mol_type = other DNA
atggtgatttgtttggtttt

SEQ ID NO: 57667 - DNA, 20 bp, synthetic construct
  misc_feature 1..20: note = chemically synthesized
  source 1..20: mol_type = other DNA
ttgtctgctccaactgctct

SEQ ID NO: 57668 - DNA, 20 bp, synthetic construct
  misc_feature 1..20: note = chemically synthesized
  source 1..20: mol_type = other DNA
tgtctgctccaactgctctc

SEQ ID NO: 57669 - DNA, 20 bp, synthetic construct
  misc_feature 1..20: note = chemically synthesized
  source 1..20: mol_type = other DNA
ctgctccaactgctctcagg

SEQ ID NO: 57670 - DNA, 20 bp, synthetic construct
  misc_feature 1..20: note = chemically synthesized
  source 1..20: mol_type = other DNA
tcaggcagacatacctgctt

SEQ ID NO: 57671 - DNA, 20 bp, synthetic construct
  misc_feature 1..20: note = chemically synthesized
  source 1..20: mol_type = other DNA
acctgcttaagaaccttcac

SEQ ID NO: 57672 - DNA, 20 bp, synthetic construct
  misc_feature 1..20: note = chemically synthesized
  source 1..20: mol_type = other DNA
gaaccttcactggctcccca

SEQ ID NO: 57673 - DNA, 20 bp, synthetic construct
  misc_feature 1..20: note = chemically synthesized
  source 1..20: mol_type = other DNA
tccccacagcctcatgaatc

SEQ ID NO: 57674 - DNA, 20 bp, synthetic construct
  misc_feature 1..20: note = chemically synthesized
  source 1..20: mol_type = other DNA
ccaaactccatgctcctcct

SEQ ID NO: 57675 - DNA, 20 bp, synthetic construct
  misc_feature 1..20: note = chemically synthesized
  source 1..20: mol_type = other DNA
ccctacctcaacctaccttg

SEQ ID NO: 57676 - DNA, 20 bp, synthetic construct
  misc_feature 1..20: note = chemically synthesized
  source 1..20: mol_type = other DNA
atctctgtatatatgcatct

SEQ ID NO: 57677 - DNA, 20 bp, synthetic construct
  misc_feature 1..20: note = chemically synthesized
  source 1..20: mol_type = other DNA
tatatatgcatcttggactc

SEQ ID NO: 57678 - DNA, 20 bp, synthetic construct
  misc_feature 1..20: note = chemically synthesized
  source 1..20: mol_type = other DNA
tatgcatcttggactccagt

SEQ ID NO: 57679 - DNA, 20 bp, synthetic construct
  misc_feature 1..20: note = chemically synthesized
  source 1..20: mol_type = other DNA
tgcatcttggactccagtca

SEQ ID NO: 57680 - DNA, 20 bp, synthetic construct
  misc_feature 1..20: note = chemically synthesized
  source 1..20: mol_type = other DNA
atcttggactccagtcagag

SEQ ID NO: 57681 - DNA, 20 bp, synthetic construct
  misc_feature 1..20: note = chemically synthesized
  source 1..20: mol_type = other DNA
ggactccagtcagagtagaa

SEQ ID NO: 57682 - DNA, 20 bp, synthetic construct
  misc_feature 1..20: note = chemically synthesized
  source 1..20: mol_type = other DNA
actccagtcagagtagaaca

SEQ ID NO: 57683 - DNA, 20 bp, synthetic construct
  misc_feature 1..20: note = chemically synthesized
  source 1..20: mol_type = other DNA
gagtccaccccctttaccca

SEQ ID NO: 57684 - DNA, 20 bp, synthetic construct
  misc_feature 1..20: note = chemically synthesized
  source 1..20: mol_type = other DNA
accccctttacccaaagcct

SEQ ID NO: 57685 - DNA, 20 bp, synthetic construct
  misc_feature 1..20: note = chemically synthesized
  source 1..20: mol_type = other DNA
ccccctttacccaaagcctt

SEQ ID NO: 57686 - DNA, 20 bp, synthetic construct
  misc_feature 1..20: note = chemically synthesized
  source 1..20: mol_type = other DNA
cccctttacccaaagcctta

SEQ ID NO: 57687 - DNA, 20 bp, synthetic construct
  misc_feature 1..20: note = chemically synthesized
  source 1..20: mol_type = other DNA
ccaaagccttagggccaaaa

SEQ ID NO: 57688 - DNA, 20 bp, synthetic construct
  misc_feature 1..20: note = chemically synthesized
  source 1..20: mol_type = other DNA
gccaaaacggttttgaacct

SEQ ID NO: 57689 - DNA, 20 bp, synthetic construct
  misc_feature 1..20: note = chemically synthesized
  source 1..20: mol_type = other DNA
tttgaacctcagaacttgtt

SEQ ID NO: 57690 - DNA, 20 bp, synthetic construct
  misc_feature 1..20: note = chemically synthesized
  source 1..20: mol_type = other DNA
ctcagaacttgtttggattt

SEQ ID NO: 57691 - DNA, 20 bp, synthetic construct
  misc_feature 1..20: note = chemically synthesized
  source 1..20: mol_type = other DNA
gaacttgtttggattttaga

SEQ ID NO: 57692 - DNA, 20 bp, synthetic construct
  misc_feature 1..20: note = chemically synthesized
  source 1..20: mol_type = other DNA
aacttgtttggattttagaa

SEQ ID NO: 57693 - DNA, 20 bp, synthetic construct
  misc_feature 1..20: note = chemically synthesized
  source 1..20: mol_type = other DNA
ttgtttggattttagaaagg

SEQ ID NO: 57694 - DNA, 20 bp, synthetic construct
  misc_feature 1..20: note = chemically synthesized
  source 1..20: mol_type = other DNA
ggattttagaaaggcagtaa

SEQ ID NO: 57695 - DNA, 20 bp, synthetic construct
  misc_feature 1..20: note = chemically synthesized
  source 1..20: mol_type = other DNA
gattttagaaaggcagtaat

SEQ ID NO: 57696 - DNA, 20 bp, synthetic construct
  misc_feature 1..20: note = chemically synthesized
  source 1..20: mol_type = other DNA
gaaaggcagtaatgggcaat

SEQ ID NO: 57697 - DNA, 20 bp, synthetic construct
  misc_feature 1..20: note = chemically synthesized
  source 1..20: mol_type = other DNA
aaggcagtaatgggcaatca

SEQ ID NO: 57698 - DNA, 20 bp, synthetic construct
  misc_feature 1..20: note = chemically synthesized
  source 1..20: mol_type = other DNA
atgggcaatcagagtctgct

SEQ ID NO: 57699 - DNA, 20 bp, synthetic construct
  misc_feature 1..20: note = chemically synthesized
  source 1..20: mol_type = other DNA
ggcaatcagagtctgcttgg

SEQ ID NO: 57700 - DNA, 20 bp, synthetic construct
  misc_feature 1..20: note = chemically synthesized
  source 1..20: mol_type = other DNA
agagtctgcttggaagaatc

SEQ ID NO: 57701 - DNA, 20 bp, synthetic construct
  misc_feature 1..20: note = chemically synthesized
  source 1..20: mol_type = other DNA
agtctgcttggaagaatctg

SEQ ID NO: 57702 - DNA, 20 bp, synthetic construct
  misc_feature 1..20: note = chemically synthesized
  source 1..20: mol_type = other DNA
gctgcatactgtaatctatg

SEQ ID NO: 57703 - DNA, 20 bp, synthetic construct
  misc_feature 1..20: note = chemically synthesized
  source 1..20: mol_type = other DNA
aattaaaaataatctcatgt

SEQ ID NO: 57704 - DNA, 20 bp, synthetic construct
  misc_feature 1..20: note = chemically synthesized
  source 1..20: mol_type = other DNA
aatctcatgtcagttcacgt

SEQ ID NO: 57705 - DNA, 20 bp, synthetic construct
  misc_feature 1..20: note = chemically synthesized
  source 1..20: mol_type = other DNA
atctcatgtcagttcacgtc

SEQ ID NO: 57706 - DNA, 20 bp, synthetic construct
  misc_feature 1..20: note = chemically synthesized
  source 1..20: mol_type = other DNA
taaatcacaaaaaaaacttt

SEQ ID NO: 57707 - DNA, 20 bp, synthetic construct
  misc_feature 1..20: note = chemically synthesized
  source 1..20: mol_type = other DNA
tttcgtaacattttacattt

SEQ ID NO: 57708 - DNA, 20 bp, synthetic construct
  misc_feature 1..20: note = chemically synthesized
  source 1..20: mol_type = other DNA
gtaacattttacatttcaga

SEQ ID NO: 57709 - DNA, 20 bp, synthetic construct
  misc_feature 1..20: note = chemically synthesized
  source 1..20: mol_type = other DNA
acattttacatttcagacgg

SEQ ID NO: 57710 - DNA, 20 bp, synthetic construct
  misc_feature 1..20: note = chemically synthesized
  source 1..20: mol_type = other DNA
tacatttcagacggtggata

SEQ ID NO: 57711 - DNA, 20 bp, synthetic construct
  misc_feature 1..20: note = chemically synthesized
  source 1..20: mol_type = other DNA
agacggtggataaagaactg

SEQ ID NO: 57712 - DNA, 20 bp, synthetic construct
  misc_feature 1..20: note = chemically synthesized
  source 1..20: mol_type = other DNA
acggtggataaagaactgtg

SEQ ID NO: 57713 - DNA, 20 bp, synthetic construct
  misc_feature 1..20: note = chemically synthesized
  source 1..20: mol_type = other DNA
cggtggataaagaactgtgg

SEQ ID NO: 57714 - DNA, 20 bp, synthetic construct
  misc_feature 1..20: note = chemically synthesized
  source 1..20: mol_type = other DNA
ggataaagaactgtggaggc

SEQ ID NO: 57715 - DNA, 20 bp, synthetic construct
  misc_feature 1..20: note = chemically synthesized
  source 1..20: mol_type = other DNA
gataaagaactgtggaggcc

SEQ ID NO: 57716 - DNA, 20 bp, synthetic construct
  misc_feature 1..20: note = chemically synthesized
  source 1..20: mol_type = other DNA
agaactgtggaggccaggcg

SEQ ID NO: 57717 - DNA, 20 bp, synthetic construct
  misc_feature 1..20: note = chemically synthesized
  source 1..20: mol_type = other DNA
actgtggaggccaggcgtgg

SEQ ID NO: 57718 - DNA, 20 bp, synthetic construct
  misc_feature 1..20: note = chemically synthesized
  source 1..20: mol_type = other DNA
gtggctcacacctgtaattc

SEQ ID NO: 57719 - DNA, 20 bp, synthetic construct
  misc_feature 1..20: note = chemically synthesized
  source 1..20: mol_type = other DNA
cacctgtaattcgagcactt

SEQ ID NO: 57720 - DNA, 20 bp, synthetic construct
  misc_feature 1..20: note = chemically synthesized
  source 1..20: mol_type = other DNA
acctgtaattcgagcacttt

SEQ ID NO: 57721 - DNA, 20 bp, synthetic construct
  misc_feature 1..20: note = chemically synthesized
  source 1..20: mol_type = other DNA
ctgtaattcgagcactttgg

SEQ ID NO: 57722 - DNA, 20 bp, synthetic construct
  misc_feature 1..20: note = chemically synthesized
  source 1..20: mol_type = other DNA
tgtaattcgagcactttggg

SEQ ID NO: 57723 - DNA, 20 bp, synthetic construct
  misc_feature 1..20: note = chemically synthesized
  source 1..20: mol_type = other DNA
ttcgagcactttgggaggct

SEQ ID NO: 57724 - DNA, 20 bp, synthetic construct
  misc_feature 1..20: note = chemically synthesized
  source 1..20: mol_type = other DNA
tcgagcactttgggaggctg

SEQ ID NO: 57725 - DNA, 20 bp, synthetic construct
  misc_feature 1..20: note = chemically synthesized
  source 1..20: mol_type = other DNA
agcactttgggaggctgagg

SEQ ID NO: 57726 - DNA, 20 bp, synthetic construct
  misc_feature 1..20: note = chemically synthesized
  source 1..20: mol_type = other DNA
gcactttgggaggctgaggc

SEQ ID NO: 57727 - DNA, 20 bp, synthetic construct
  misc_feature 1..20: note = chemically synthesized
  source 1..20: mol_type = other DNA
actttgggaggctgaggcgg

SEQ ID NO: 57728 - DNA, 20 bp, synthetic construct
  misc_feature 1..20: note = chemically synthesized
  source 1..20: mol_type = other DNA
ctttgggaggctgaggcggg

SEQ ID NO: 57729 - DNA, 20 bp, synthetic construct
  misc_feature 1..20: note = chemically synthesized
  source 1..20: mol_type = other DNA
aggcgggaggatcacctcct

SEQ ID NO: 57730 - DNA, 20 bp, synthetic construct
  misc_feature 1..20: note = chemically synthesized
  source 1..20: mol_type = other DNA
atcacctcctcggatccact

SEQ ID NO: 57731 - DNA, 20 bp, synthetic construct
  misc_feature 1..20: note = chemically synthesized
  source 1..20: mol_type = other DNA
tcacctcctcggatccactg

SEQ ID NO: 57732 - DNA, 20 bp, synthetic construct
  misc_feature 1..20: note = chemically synthesized
  source 1..20: mol_type = other DNA
acctcctcggatccactgag

SEQ ID NO: 57733 - DNA, 20 bp, synthetic construct
  misc_feature 1..20: note = chemically synthesized
  source 1..20: mol_type = other DNA
cctcctcggatccactgagg

SEQ ID NO: 57734 - DNA, 20 bp, synthetic construct
  misc_feature 1..20: note = chemically synthesized
  source 1..20: mol_type = other DNA
ctcggatccactgaggaggt

SEQ ID NO: 57735 - DNA, 20 bp, synthetic construct
  misc_feature 1..20: note = chemically synthesized
  source 1..20: mol_type = other DNA
tcggatccactgaggaggtc

SEQ ID NO: 57736 - DNA, 20 bp, synthetic construct
  misc_feature 1..20: note = chemically synthesized
  source 1..20: mol_type = other DNA
ggatccactgaggaggtcag

SEQ ID NO: 57737 - DNA, 20 bp, synthetic construct
  misc_feature 1..20: note = chemically synthesized
  source 1..20: mol_type = other DNA
ggaggtcaggagtttgcgac

SEQ ID NO: 57738 - DNA, 20 bp, synthetic construct
  misc_feature 1..20: note = chemically synthesized
  source 1..20: mol_type = other DNA
tcaggagtttgcgactagcc

SEQ ID NO: 57739 - DNA, 20 bp, synthetic construct
  misc_feature 1..20: note = chemically synthesized
  source 1..20: mol_type = other DNA
tgcgactagcctggccaacg

SEQ ID NO: 57740 - DNA, 20 bp, synthetic construct
  misc_feature 1..20: note = chemically synthesized
  source 1..20: mol_type = other DNA
tctactaaaaatacaaaaat

SEQ ID NO: 57741 - DNA, 20 bp, synthetic construct
  misc_feature 1..20: note = chemically synthesized
  source 1..20: mol_type = other DNA
ctaaaaatacaaaaattagc

SEQ ID NO: 57742 - DNA, 20 bp, synthetic construct
  misc_feature 1..20: note = chemically synthesized
  source 1..20: mol_type = other DNA
taaaaatacaaaaattagcc

SEQ ID NO: 57743 - DNA, 20 bp, synthetic construct
  misc_feature 1..20: note = chemically synthesized
  source 1..20: mol_type = other DNA
atacaaaaattagccgggcg

SEQ ID NO: 57744 - DNA, 20 bp, synthetic construct
  misc_feature 1..20: note = chemically synthesized
  source 1..20: mol_type = other DNA
caaaaattagccgggcgtgg

SEQ ID NO: 57745 - DNA, 20 bp, synthetic construct
  misc_feature 1..20: note = chemically synthesized
  source 1..20: mol_type = other DNA
aaattagccgggcgtggtgg

SEQ ID NO: 57746 - DNA, 20 bp, synthetic construct
  misc_feature 1..20: note = chemically synthesized
  source 1..20: mol_type = other DNA
aattagccgggcgtggtggc

SEQ ID NO: 57747 - DNA, 20 bp, synthetic construct
  misc_feature 1..20: note = chemically synthesized
  source 1..20: mol_type = other DNA
gtggcaggtacctgtaatcc

SEQ ID NO: 57748 - DNA, 20 bp, synthetic construct
  misc_feature 1..20: note = chemically synthesized
  source 1..20: mol_type = other DNA
tacctgtaatcccagcttct

SEQ ID NO: 57749 - DNA, 20 bp, synthetic construct
  misc_feature 1..20: note = chemically synthesized
  source 1..20: mol_type = other DNA
acctgtaatcccagcttctt

SEQ ID NO: 57750 - DNA, 20 bp, synthetic construct
  misc_feature 1..20: note = chemically synthesized
  source 1..20: mol_type = other DNA
ctgtaatcccagcttcttgg

SEQ ID NO: 57751 - DNA, 20 bp, synthetic construct
  misc_feature 1..20: note = chemically synthesized
  source 1..20: mol_type = other DNA
tgtaatcccagcttcttggg

SEQ ID NO: 57752 - DNA, 20 bp, synthetic construct
  misc_feature 1..20: note = chemically synthesized
  source 1..20: mol_type = other DNA
tcccagcttcttgggaggct

SEQ ID NO: 57753 - DNA, 20 bp, synthetic construct
  misc_feature 1..20: note = chemically synthesized
  source 1..20: mol_type = other DNA
cccagcttcttgggaggctg

SEQ ID NO: 57754 - DNA, 20 bp, synthetic construct
  misc_feature 1..20: note = chemically synthesized
  source 1..20: mol_type = other DNA
agcttcttgggaggctgagg

SEQ ID NO: 57755 - DNA, 20 bp, synthetic construct
  misc_feature 1..20: note = chemically synthesized
  source 1..20: mol_type = other DNA
gcttcttgggaggctgaggc

SEQ ID NO: 57756 - DNA, 20 bp, synthetic construct
  misc_feature 1..20: note = chemically synthesized
  source 1..20: mol_type = other DNA
ttcttgggaggctgaggcag

SEQ ID NO: 57757 - DNA, 20 bp, synthetic construct
  misc_feature 1..20: note = chemically synthesized
  source 1..20: mol_type = other DNA
gcaggagaaccacttgaacc

SEQ ID NO: 57758 - DNA, 20 bp, synthetic construct
  misc_feature 1..20: note = chemically synthesized
  source 1..20: mol_type = other DNA
caggagaaccacttgaaccc

SEQ ID NO: 57759 - DNA, 20 bp, synthetic construct
  misc_feature 1..20: note = chemically synthesized
  source 1..20: mol_type = other DNA
ggagaaccacttgaacccgg

SEQ ID NO: 57760 - DNA, 20 bp, synthetic construct
  misc_feature 1..20: note = chemically synthesized
  source 1..20: mol_type = other DNA
aaccacttgaacccgggaga

SEQ ID NO: 57761 - DNA, 20 bp, synthetic construct
  misc_feature 1..20: note = chemically synthesized
  source 1..20: mol_type = other DNA
aacccgggagacagatgttg

SEQ ID NO: 57762 - DNA, 20 bp, synthetic construct
  misc_feature 1..20: note = chemically synthesized
  source 1..20: mol_type = other DNA
cgggagacagatgttgcagt

SEQ ID NO: 57763 - DNA, 20 bp, synthetic construct
  misc_feature 1..20: note = chemically synthesized
  source 1..20: mol_type = other DNA
gacagatgttgcagtgagct

SEQ ID NO: 57764 - DNA, 20 bp, synthetic construct
  misc_feature 1..20: note = chemically synthesized
  source 1..20: mol_type = other DNA
gagactgcaccattgcactc

SEQ ID NO: 57765 - DNA, 20 bp, synthetic construct
  misc_feature 1..20: note = chemically synthesized
  source 1..20: mol_type = other DNA
tgcaccattgcactccagcc

SEQ ID NO: 57766 - DNA, 20 bp, synthetic construct
  misc_feature 1..20: note = chemically synthesized
  source 1..20: mol_type = other DNA
gcaccattgcactccagcct

SEQ ID NO: 57767 - DNA, 20 bp, synthetic construct
  misc_feature 1..20: note = chemically synthesized
  source 1..20: mol_type = other DNA
tgcactccagcctgggcaac

SEQ ID NO: 57768 - DNA, 20 bp, synthetic construct
  misc_feature 1..20: note = chemically synthesized
  source 1..20: mol_type = other DNA
cactccagcctgggcaacaa

SEQ ID NO: 57769 - DNA, 20 bp, synthetic construct
  misc_feature 1..20: note = chemically synthesized
  source 1..20: mol_type = other DNA
aaactccatctcaaaaaaaa

SEQ ID NO: 57770 - DNA, 20 bp, synthetic construct
  misc_feature 1..20: note = chemically synthesized
  source 1..20: mol_type = other DNA
catctcaaaaaaaaaagaaa

SEQ ID NO: 57771 - DNA, 20 bp, synthetic construct
  misc_feature 1..20: note = chemically synthesized
  source 1..20: mol_type = other DNA
aaaaaaaagaaaaagaactg

SEQ ID NO: 57772 - DNA, 20 bp, synthetic construct
  misc_feature 1..20: note = chemically synthesized
  source 1..20: mol_type = other DNA
tgctccttatcttccacctc

SEQ ID NO: 57773 - DNA, 20 bp, synthetic construct
  misc_feature 1..20: note = chemically synthesized
  source 1..20: mol_type = other DNA
tcttccacctctggttttcc

SEQ ID NO: 57774 - DNA, 20 bp, synthetic construct
  misc_feature 1..20: note = chemically synthesized
  source 1..20: mol_type = other DNA
cagctctgtatctttgttca

SEQ ID NO: 57775 - DNA, 20 bp, synthetic construct
  misc_feature 1..20: note = chemically synthesized
  source 1..20: mol_type = other DNA
ttcatggtacctcctaatcc

SEQ ID NO: 57776 - DNA, 20 bp, synthetic construct
  misc_feature 1..20: note = chemically synthesized
  source 1..20: mol_type = other DNA
gaactcctactaatgcttca

SEQ ID NO: 57777 - DNA, 20 bp, synthetic construct
  misc_feature 1..20: note = chemically synthesized
  source 1..20: mol_type = other DNA
taaataaaaattgaatgaat

SEQ ID NO: 57778 - DNA, 20 bp, synthetic construct
  misc_feature 1..20: note = chemically synthesized
  source 1..20: mol_type = other DNA
aaataaaaattgaatgaatt

SEQ ID NO: 57779 - DNA, 20 bp, synthetic construct
  misc_feature 1..20: note = chemically synthesized
  source 1..20: mol_type = other DNA
ataaaaattgaatgaattgg

SEQ ID NO: 57780 - DNA, 20 bp, synthetic construct
  misc_feature 1..20: note = chemically synthesized
  source 1..20: mol_type = other DNA
aaaaattgaatgaattggga

SEQ ID NO: 57781 - DNA, 20 bp, synthetic construct
  misc_feature 1..20: note = chemically synthesized
  source 1..20: mol_type = other DNA
aattgggagagtactctgtg

SEQ ID NO: 57782 - DNA, 20 bp, synthetic construct
  misc_feature 1..20: note = chemically synthesized
  source 1..20: mol_type = other DNA
tgggagagtactctgtgcag

SEQ ID NO: 57783 - DNA, 20 bp, synthetic construct
  misc_feature 1..20: note = chemically synthesized
  source 1..20: mol_type = other DNA
ggagagtactctgtgcagtg

SEQ ID NO: 57784 - DNA, 20 bp, synthetic construct
  misc_feature 1..20: note = chemically synthesized
  source 1..20: mol_type = other DNA
tactctgtgcagtggagtgt

SEQ ID NO: 57785 - DNA, 20 bp, synthetic construct
  misc_feature 1..20: note = chemically synthesized
  source 1..20: mol_type = other DNA
gtgcagtggagtgtcagttc

SEQ ID NO: 57786 - DNA, 20 bp, synthetic construct
  misc_feature 1..20: note = chemically synthesized
  source 1..20: mol_type = other DNA
gagtgtcagttctggaaacc

SEQ ID NO: 57787 - DNA, 20 bp, synthetic construct
  misc_feature 1..20: note = chemically synthesized
  source 1..20: mol_type = other DNA
aaacccagttctaatgcacc

SEQ ID NO: 57788 - DNA, 20 bp, synthetic construct
  misc_feature 1..20: note = chemically synthesized
  source 1..20: mol_type = other DNA
aacccagttctaatgcacct

SEQ ID NO: 57789 - DNA, 20 bp, synthetic construct
  misc_feature 1..20: note = chemically synthesized
  source 1..20: mol_type = other DNA
acccagttctaatgcacctg

SEQ ID NO: 57790 - DNA, 20 bp, synthetic construct
  misc_feature 1..20: note = chemically synthesized
  source 1..20: mol_type = other DNA
ctggggtgacctcctctctc

SEQ ID NO: 57791 - DNA, 20 bp, synthetic construct
  misc_feature 1..20: note = chemically synthesized
  source 1..20: mol_type = other DNA
tggggtgacctcctctctct

SEQ ID NO: 57792 - DNA, 20 bp, synthetic construct
  misc_feature 1..20: note = chemically synthesized
  source 1..20: mol_type = other DNA
gacctcctctctctgggcct

SEQ ID NO: 57793 - DNA, 20 bp, synthetic construct
  misc_feature 1..20: note = chemically synthesized
  source 1..20: mol_type = other DNA
cctcagtttctcatgactaa

SEQ ID NO: 57794 - DNA, 20 bp, synthetic construct
  misc_feature 1..20: note = chemically synthesized
  source 1..20: mol_type = other DNA
gtttctcatgactaaaagaa

SEQ ID NO: 57795 - DNA, 20 bp, synthetic construct
  misc_feature 1..20: note = chemically synthesized
  source 1..20: mol_type = other DNA
tttctcatgactaaaagaaa

SEQ ID NO: 57796 - DNA, 20 bp, synthetic construct
  misc_feature 1..20: note = chemically synthesized
  source 1..20: mol_type = other DNA
catgactaaaagaaaaggat

SEQ ID NO: 57797 - DNA, 20 bp, synthetic construct
  misc_feature 1..20: note = chemically synthesized
  source 1..20: mol_type = other DNA
atgaatgaataaatgaactt

SEQ ID NO: 57798 - DNA, 20 bp, synthetic construct
  misc_feature 1..20: note = chemically synthesized
  source 1..20: mol_type = other DNA
tgaatgaataaatgaacttg

SEQ ID NO: 57799 - DNA, 20 bp, synthetic construct
  misc_feature 1..20: note = chemically synthesized
  source 1..20: mol_type = other DNA
aatgaataaatgaacttgag

SEQ ID NO: 57800 - DNA, 20 bp, synthetic construct
  misc_feature 1..20: note = chemically synthesized
  source 1..20: mol_type = other DNA
atgaataaatgaacttgagg

SEQ ID NO: 57801 - DNA, 20 bp, synthetic construct
  misc_feature 1..20: note = chemically synthesized
  source 1..20: mol_type = other DNA
ctcctgttccaaacttccac

SEQ ID NO: 57802 - DNA, 20 bp, synthetic construct
  misc_feature 1..20: note = chemically synthesized
  source 1..20: mol_type = other DNA
cctgttccaaacttccacca

SEQ ID NO: 57803 - DNA, 20 bp, synthetic construct
  misc_feature 1..20: note = chemically synthesized
  source 1..20: mol_type = other DNA
gttccaaacttccaccagag

SEQ ID NO: 57804 - DNA, 20 bp, synthetic construct
  misc_feature 1..20: note = chemically synthesized
  source 1..20: mol_type = other DNA
accagagaagaaacatcctc

SEQ ID NO: 57805 - DNA, 20 bp, synthetic construct
  misc_feature 1..20: note = chemically synthesized
  source 1..20: mol_type = other DNA
ccagagaagaaacatcctca

SEQ ID NO: 57806 - DNA, 20 bp, synthetic construct
  misc_feature 1..20: note = chemically synthesized
  source 1..20: mol_type = other DNA
cagagaagaaacatcctcaa

SEQ ID NO: 57807 - DNA, 20 bp, synthetic construct
  misc_feature 1..20: note = chemically synthesized
  source 1..20: mol_type = other DNA
aagaaacatcctcaagggct

SEQ ID NO: 57808 - DNA, 20 bp, synthetic construct
  misc_feature 1..20: note = chemically synthesized
  source 1..20: mol_type = other DNA
acatcctcaagggcttggtt

SEQ ID NO: 57809 - DNA, 20 bp, synthetic construct
  misc_feature 1..20: note = chemically synthesized
  source 1..20: mol_type = other DNA
catcctcaagggcttggttc

SEQ ID NO: 57810 - DNA, 20 bp, synthetic construct
  misc_feature 1..20: note = chemically synthesized
  source 1..20: mol_type = other DNA
cctcaagggcttggttcagg

SEQ ID NO: 57811 - DNA, 20 bp, synthetic construct
  misc_feature 1..20: note = chemically synthesized
  source 1..20: mol_type = other DNA
gcttggttcaggtggtcata

SEQ ID NO: 57812 - DNA, 20 bp, synthetic construct
  misc_feature 1..20: note = chemically synthesized
  source 1..20: mol_type = other DNA
gcctctgcttactcacctct

SEQ ID NO: 57813 - DNA, 20 bp, synthetic construct
  misc_feature 1..20: note = chemically synthesized
  source 1..20: mol_type = other DNA
cctctgcttactcacctctc

SEQ ID NO: 57814 - DNA, 20 bp, synthetic construct
  misc_feature 1..20: note = chemically synthesized
  source 1..20: mol_type = other DNA
tgcttactcacctctcagga

SEQ ID NO: 57815 - DNA, 20 bp, synthetic construct
  misc_feature 1..20: note = chemically synthesized
  source 1..20: mol_type = other DNA
gcttactcacctctcaggat

SEQ ID NO: 57816 - DNA, 20 bp, synthetic construct
  misc_feature 1..20: note = chemically synthesized
  source 1..20: mol_type = other DNA
cttactcacctctcaggatg

SEQ ID NO: 57817 - DNA, 20 bp, synthetic construct
  misc_feature 1..20: note = chemically synthesized
  source 1..20: mol_type = other DNA
gatggggtactcactatttc

SEQ ID NO: 57818 - DNA, 20 bp, synthetic construct
  misc_feature 1..20: note = chemically synthesized
  source 1..20: mol_type = other DNA
ggtactcactatttccagaa

SEQ ID NO: 57819 - DNA, 20 bp, synthetic construct
  misc_feature 1..20: note = chemically synthesized
  source 1..20: mol_type = other DNA
tatttccagaacagttgttt

SEQ ID NO: 57820 - DNA, 20 bp, synthetic construct
  misc_feature 1..20: note = chemically synthesized
  source 1..20: mol_type = other DNA
tttccagaacagttgttttg

SEQ ID NO: 57821 - DNA, 20 bp, synthetic construct
  misc_feature 1..20: note = chemically synthesized
  source 1..20: mol_type = other DNA
ccagaacagttgttttggag

SEQ ID NO: 57822 - DNA, 20 bp, synthetic construct
  misc_feature 1..20: note = chemically synthesized
  source 1..20: mol_type = other DNA
gaacagttgttttggagcag

SEQ ID NO: 57823 - DNA, 20 bp, synthetic construct
  misc_feature 1..20: note = chemically synthesized
  source 1..20: mol_type = other DNA
tgaaatgccctttcttatcc

SEQ ID NO: 57824 - DNA, 20 bp, synthetic construct
  misc_feature 1..20: note = chemically synthesized
  source 1..20: mol_type = other DNA
acaaccccacaacatccctc

SEQ ID NO: 57825 - DNA, 20 bp, synthetic construct
  misc_feature 1..20: note = chemically synthesized
  source 1..20: mol_type = other DNA
ccccacaacatccctcgaga

SEQ ID NO: 57826 - DNA, 20 bp, synthetic construct
  misc_feature 1..20: note = chemically synthesized
  source 1..20: mol_type = other DNA
aacatccctcgagaaagtca

SEQ ID NO: 57827 - DNA, 20 bp, synthetic construct
  misc_feature 1..20: note = chemically synthesized
  source 1..20: mol_type = other DNA
acatccctcgagaaagtcaa

SEQ ID NO: 57828 - DNA, 20 bp, synthetic construct
  misc_feature 1..20: note = chemically synthesized
  source 1..20: mol_type = other DNA
cctcgagaaagtcaaaggct

SEQ ID NO: 57829 - DNA, 20 bp, synthetic construct
  misc_feature 1..20: note = chemically synthesized
  source 1..20: mol_type = other DNA
ctcgagaaagtcaaaggctc

SEQ ID NO: 57830 - DNA, 20 bp, synthetic construct
  misc_feature 1..20: note = chemically synthesized
  source 1..20: mol_type = other DNA
tcgagaaagtcaaaggctca

SEQ ID NO: 57831 - DNA, 20 bp, synthetic construct
  misc_feature 1..20: note = chemically synthesized
  source 1..20: mol_type = other DNA
aagtcaaaggctcagggaac

SEQ ID NO: 57832 - DNA, 20 bp, synthetic construct
  misc_feature 1..20: note = chemically synthesized
  source 1..20: mol_type = other DNA
agtcaaaggctcagggaaca

SEQ ID NO: 57833 - DNA, 20 bp, synthetic construct
  misc_feature 1..20: note = chemically synthesized
  source 1..20: mol_type = other DNA
caaaggctcagggaacaagg

SEQ ID NO: 57834 - DNA, 20 bp, synthetic construct
  misc_feature 1..20: note = chemically synthesized
  source 1..20: mol_type = other DNA
aaggctcagggaacaaggaa

SEQ ID NO: 57835 - DNA, 20 bp, synthetic construct
  misc_feature 1..20: note = chemically synthesized
  source 1..20: mol_type = other DNA
aggctcagggaacaaggaag

SEQ ID NO: 57836 - DNA, 20 bp, synthetic construct
  misc_feature 1..20: note = chemically synthesized
  source 1..20: mol_type = other DNA
ggctcagggaacaaggaaga

SEQ ID NO: 57837 - DNA, 20 bp, synthetic construct
  misc_feature 1..20: note = chemically synthesized
  source 1..20: mol_type = other DNA
acaaggaagagggctatact

SEQ ID NO: 57838 - DNA, 20 bp, synthetic construct
  misc_feature 1..20: note = chemically synthesized
  source 1..20: mol_type = other DNA
gaagagggctatactgagct

SEQ ID NO: 57839 - DNA, 20 bp, synthetic construct
  misc_feature 1..20: note = chemically synthesized
  source 1..20: mol_type = other DNA
agggctatactgagctgagt

SEQ ID NO: 57840 - DNA, 20 bp, synthetic construct
  misc_feature 1..20: note = chemically synthesized
  source 1..20: mol_type = other DNA
gggctatactgagctgagta

SEQ ID NO: 57841 - DNA, 20 bp, synthetic construct
  misc_feature 1..20: note = chemically synthesized
  source 1..20: mol_type = other DNA
ggacttgccatcctgccacc

SEQ ID NO: 57842 - DNA, 20 bp, synthetic construct
  misc_feature 1..20: note = chemically synthesized
  source 1..20: mol_type = other DNA
atcctgccacccagcacact

SEQ ID NO: 57843 - DNA, 20 bp, synthetic construct
  misc_feature 1..20: note = chemically synthesized
  source 1..20: mol_type = other DNA
tgccacccagcacactcaga

SEQ ID NO: 57844 - DNA, 20 bp, synthetic construct
  misc_feature 1..20: note = chemically synthesized
  source 1..20: mol_type = other DNA
cacccagcacactcagacag

SEQ ID NO: 57845 - DNA, 20 bp, synthetic construct
  misc_feature 1..20: note = chemically synthesized
  source 1..20: mol_type = other DNA
agcacactcagacagaagcg

SEQ ID NO: 57846 - DNA, 20 bp, synthetic construct
  misc_feature 1..20: note = chemically synthesized
  source 1..20: mol_type = other DNA
gcacactcagacagaagcgt

SEQ ID NO: 57847 - DNA, 20 bp, synthetic construct
  misc_feature 1..20: note = chemically synthesized
  source 1..20: mol_type = other DNA
cactcagacagaagcgtggg

SEQ ID NO: 57848 - DNA, 20 bp, synthetic construct
  misc_feature 1..20: note = chemically synthesized
  source 1..20: mol_type = other DNA
actcagacagaagcgtgggc

SEQ ID NO: 57849 - DNA, 20 bp, synthetic construct
  misc_feature 1..20: note = chemically synthesized
  source 1..20: mol_type = other DNA
cagacagaagcgtgggcagg

SEQ ID NO: 57850 - DNA, 20 bp, synthetic construct
  misc_feature 1..20: note = chemically synthesized
  source 1..20: mol_type = other DNA
aagcgtgggcaggcagctgt

SEQ ID NO: 57851 - DNA, 20 bp, synthetic construct
  misc_feature 1..20: note = chemically synthesized
  source 1..20: mol_type = other DNA
cgtgggcaggcagctgtgag

SEQ ID NO: 57852 - DNA, 20 bp, synthetic construct
  misc_feature 1..20: note = chemically synthesized
  source 1..20: mol_type = other DNA
gggcaggcagctgtgagtgg

SEQ ID NO: 57853 - DNA, 20 bp, synthetic construct
  misc_feature 1..20: note = chemically synthesized
  source 1..20: mol_type = other DNA
cagaattttcccctctgccc

SEQ ID NO: 57854 - DNA, 20 bp, synthetic construct
  misc_feature 1..20: note = chemically synthesized
  source 1..20: mol_type = other DNA
agaattttcccctctgcccc

SEQ ID NO: 57855 - DNA, 20 bp, synthetic construct
  misc_feature 1..20: note = chemically synthesized
  source 1..20: mol_type = other DNA
aattttcccctctgccccag

SEQ ID NO: 57856 - DNA, 20 bp, synthetic construct
  misc_feature 1..20: note = chemically synthesized
  source 1..20: mol_type = other DNA
cccctctgccccaggagctg

SEQ ID NO: 57857 - DNA, 20 bp, synthetic construct
  misc_feature 1..20: note = chemically synthesized
  source 1..20: mol_type = other DNA
ctgccccaggagctgtggtt

SEQ ID NO: 57858 - DNA, 20 bp, synthetic construct
  misc_feature 1..20: note = chemically synthesized
  source 1..20: mol_type = other DNA
gccccaggagctgtggtttg

SEQ ID NO: 57859 - DNA, 20 bp, synthetic construct
  misc_feature 1..20: note = chemically synthesized
  source 1..20: mol_type = other DNA
aggagctgtggtttggagca

SEQ ID NO: 57860 - DNA, 20 bp, synthetic construct
  misc_feature 1..20: note = chemically synthesized
  source 1..20: mol_type = other DNA
agcaaagacaatgtcaccaa

SEQ ID NO: 57861 - DNA, 20 bp, synthetic construct
  misc_feature 1..20: note = chemically synthesized
  source 1..20: mol_type = other DNA
gcaaagacaatgtcaccaac

SEQ ID NO: 57862 - DNA, 20 bp, synthetic construct
  misc_feature 1..20: note = chemically synthesized
  source 1..20: mol_type = other DNA
gtcaccaacaggtcacactg

SEQ ID NO: 57863 - DNA, 20 bp, synthetic construct
  misc_feature 1..20: note = chemically synthesized
  source 1..20: mol_type = other DNA
ccaacaggtcacactgcaga

SEQ ID NO: 57864 - DNA, 20 bp, synthetic construct
  misc_feature 1..20: note = chemically synthesized
  source 1..20: mol_type = other DNA
caacaggtcacactgcagac

SEQ ID NO: 57865 - DNA, 20 bp, synthetic construct
  misc_feature 1..20: note = chemically synthesized
  source 1..20: mol_type = other DNA
aacaggtcacactgcagaca

SEQ ID NO: 57866 - DNA, 20 bp, synthetic construct
  misc_feature 1..20: note = chemically synthesized
  source 1..20: mol_type = other DNA
gcagacagggacaaaactgc

SEQ ID NO: 57867 - DNA, 20 bp, synthetic construct
  misc_feature 1..20: note = chemically synthesized
  source 1..20: mol_type = other DNA
aaaactgcaagtgatccccc

SEQ ID NO: 57868 - DNA, 20 bp, synthetic construct
  misc_feature 1..20: note = chemically synthesized
  source 1..20: mol_type = other DNA
aaactgcaagtgatcccccc

SEQ ID NO: 57869 - DNA, 20 bp, synthetic construct
  misc_feature 1..20: note = chemically synthesized
  source 1..20: mol_type = other DNA
aactgcaagtgatccccccg

SEQ ID NO: 57870 - DNA, 20 bp, synthetic construct
  misc_feature 1..20: note = chemically synthesized
  source 1..20: mol_type = other DNA
ccccccggggcttgcattgt

SEQ ID NO: 57871 - DNA, 20 bp, synthetic construct
  misc_feature 1..20: note = chemically synthesized
  source 1..20: mol_type = other DNA
ttgcattgtaagttcactca

SEQ ID NO: 57872 - DNA, 20 bp, synthetic construct
  misc_feature 1..20: note = chemically synthesized
  source 1..20: mol_type = other DNA
gtaagttcactcatggtcaa

SEQ ID NO: 57873 - DNA, 20 bp, synthetic construct
  misc_feature 1..20: note = chemically synthesized
  source 1..20: mol_type = other DNA
tctccccatctgctgccact

SEQ ID NO: 57874 - DNA, 20 bp, synthetic construct
  misc_feature 1..20: note = chemically synthesized
  source 1..20: mol_type = other DNA
catctgctgccactgagccg

SEQ ID NO: 57875 - DNA, 20 bp, synthetic construct
  misc_feature 1..20: note = chemically synthesized
  source 1..20: mol_type = other DNA
atctgctgccactgagccgt

SEQ ID NO: 57876 - DNA, 20 bp, synthetic construct
  misc_feature 1..20: note = chemically synthesized
  source 1..20: mol_type = other DNA
tctgctgccactgagccgta

SEQ ID NO: 57877 - DNA, 20 bp, synthetic construct
  misc_feature 1..20: note = chemically synthesized
  source 1..20: mol_type = other DNA
cgattgtcacctccctttta

SEQ ID NO: 57878 - DNA, 20 bp, synthetic construct
  misc_feature 1..20: note = chemically synthesized
  source 1..20: mol_type = other DNA
gtcacctcccttttaaagat

SEQ ID NO: 57879 - DNA, 20 bp, synthetic construct
  misc_feature 1..20: note = chemically synthesized
  source 1..20: mol_type = other DNA
tcacctcccttttaaagatt

SEQ ID NO: 57880 - DNA, 20 bp, synthetic construct
  misc_feature 1..20: note = chemically synthesized
  source 1..20: mol_type = other DNA
cccttttaaagattaggcaa

SEQ ID NO: 57881 - DNA, 20 bp, synthetic construct
  misc_feature 1..20: note = chemically synthesized
  source 1..20: mol_type = other DNA
cttttaaagattaggcaatg

SEQ ID NO: 57882 - DNA, 20 bp, synthetic construct
  misc_feature 1..20: note = chemically synthesized
  source 1..20: mol_type = other DNA
ttttaaagattaggcaatgg

SEQ ID NO: 57883 - DNA, 20 bp, synthetic construct
  misc_feature 1..20: note = chemically synthesized
  source 1..20: mol_type = other DNA
agattaggcaatggaggctc

SEQ ID NO: 57884 - DNA, 20 bp, synthetic construct
  misc_feature 1..20: note = chemically synthesized
  source 1..20: mol_type = other DNA
gattaggcaatggaggctca

SEQ ID NO: 57885 - DNA, 20 bp, synthetic construct
  misc_feature 1..20: note = chemically synthesized
  source 1..20: mol_type = other DNA
ggcaatggaggctcaaggat

SEQ ID NO: 57886 - DNA, 20 bp, synthetic construct
  misc_feature 1..20: note = chemically synthesized
  source 1..20: mol_type = other DNA
tcaaggataagtgacttgtc

SEQ ID NO: 57887 - DNA, 20 bp, synthetic construct
  misc_feature 1..20: note = chemically synthesized
  source 1..20: mol_type = other DNA
aagtgacttgtcaagcacca

SEQ ID NO: 57888 - DNA, 20 bp, synthetic construct
  misc_feature 1..20: note = chemically synthesized
  source 1..20: mol_type = other DNA
gacttgtcaagcaccacagc

SEQ ID NO: 57889 - DNA, 20 bp, synthetic construct
  misc_feature 1..20: note = chemically synthesized
  source 1..20: mol_type = other DNA
tgtcaagcaccacagctagt

SEQ ID NO: 57890 - DNA, 20 bp, synthetic construct
  misc_feature 1..20: note = chemically synthesized
  source 1..20: mol_type = other DNA
tcaagcaccacagctagtga

SEQ ID NO: 57891 - DNA, 20 bp, synthetic construct
  misc_feature 1..20: note = chemically synthesized
  source 1..20: mol_type = other DNA
caagcaccacagctagtgag

SEQ ID NO: 57892 - DNA, 20 bp, synthetic construct
  misc_feature 1..20: note = chemically synthesized
  source 1..20: mol_type = other DNA
gcaccacagctagtgagagg

SEQ ID NO: 57893 - DNA, 20 bp, synthetic construct
  misc_feature 1..20: note = chemically synthesized
  source 1..20: mol_type = other DNA
acagctagtgagaggaagcc

SEQ ID NO: 57894 - DNA, 20 bp, synthetic construct
  misc_feature 1..20: note = chemically synthesized
  source 1..20: mol_type = other DNA
tcaaccccacatctgactcc

SEQ ID NO: 57895 - DNA, 20 bp, synthetic construct
  misc_feature 1..20: note = chemically synthesized
  source 1..20: mol_type = other DNA
ccccacatctgactccaagc

SEQ ID NO: 57896 - DNA, 20 bp, synthetic construct
  misc_feature 1..20: note = chemically synthesized
  source 1..20: mol_type = other DNA
cccacatctgactccaagct

SEQ ID NO: 57897 - DNA, 20 bp, synthetic construct
  misc_feature 1..20: note = chemically synthesized
  source 1..20: mol_type = other DNA
ccacatctgactccaagctg

SEQ ID NO: 57898 - DNA, 20 bp, synthetic construct
  misc_feature 1..20: note = chemically synthesized
  source 1..20: mol_type = other DNA
cacatctgactccaagctgg

SEQ ID NO: 57899 - DNA, 20 bp, synthetic construct
  misc_feature 1..20: note = chemically synthesized
  source 1..20: mol_type = other DNA
tgactccaagctgggggaca

SEQ ID NO: 57900 - DNA, 20 bp, synthetic construct
  misc_feature 1..20: note = chemically synthesized
  source 1..20: mol_type = other DNA
agctgggggacacagaacct

SEQ ID NO: 57901 - DNA, 20 bp, synthetic construct
  misc_feature 1..20: note = chemically synthesized
  source 1..20: mol_type = other DNA
ggggacacagaacctcagcc

SEQ ID NO: 57902 - DNA, 20 bp, synthetic construct
  misc_feature 1..20: note = chemically synthesized
  source 1..20: mol_type = other DNA
acagaacctcagccaagtcc

SEQ ID NO: 57903 - DNA, 20 bp, synthetic construct
  misc_feature 1..20: note = chemically synthesized
  source 1..20: mol_type = other DNA
cagaacctcagccaagtcct

SEQ ID NO: 57904 - DNA, 20 bp, synthetic construct
  misc_feature 1..20: note = chemically synthesized
  source 1..20: mol_type = other DNA
acctcagccaagtcctgggc

SEQ ID NO: 57905 - DNA, 20 bp, synthetic construct
  misc_feature 1..20: note = chemically synthesized
  source 1..20: mol_type = other DNA
agtcctgggctggtaatact

SEQ ID NO: 57906 - DNA, 20 bp, synthetic construct
  misc_feature 1..20: note = chemically synthesized
  source 1..20: mol_type = other DNA
gggctggtaatacttagaaa

SEQ ID NO: 57907 - DNA, 20 bp, synthetic construct
  misc_feature 1..20: note = chemically synthesized
  source 1..20: mol_type = other DNA
tggtaatacttagaaaaagc

SEQ ID NO: 57908 - DNA, 20 bp, synthetic construct
  misc_feature 1..20: note = chemically synthesized
  source 1..20: mol_type = other DNA
taatacttagaaaaagctag

SEQ ID NO: 57909 - DNA, 20 bp, synthetic construct
  misc_feature 1..20: note = chemically synthesized
  source 1..20: mol_type = other DNA
aaaagctagtggtctcgccc

SEQ ID NO: 57910 - DNA, 20 bp, synthetic construct
  misc_feature 1..20: note = chemically synthesized
  source 1..20: mol_type = other DNA
aaagctagtggtctcgcccc

SEQ ID NO: 57911 - DNA, 20 bp, synthetic construct
  misc_feature 1..20: note = chemically synthesized
  source 1..20: mol_type = other DNA
gctagtggtctcgccccggg

SEQ ID NO: 57912 - DNA, 20 bp, synthetic construct
  misc_feature 1..20: note = chemically synthesized
  source 1..20: mol_type = other DNA
agtggtctcgccccgggaag

SEQ ID NO: 57913 - DNA, 20 bp, synthetic construct
  misc_feature 1..20: note = chemically synthesized
  source 1..20: mol_type = other DNA
ccccgggaagaagcttccca

SEQ ID NO: 57914 - DNA, 20 bp, synthetic construct
  misc_feature 1..20: note = chemically synthesized
  source 1..20: mol_type = other DNA
gaagaagcttcccacagcct

SEQ ID NO: 57915 - DNA, 20 bp, synthetic construct
  misc_feature 1..20: note = chemically synthesized
  source 1..20: mol_type = other DNA
aagaagcttcccacagcctg

SEQ ID NO: 57916 - DNA, 20 bp, synthetic construct
  misc_feature 1..20: note = chemically synthesized
  source 1..20: mol_type = other DNA
agaagcttcccacagcctga

SEQ ID NO: 57917 - DNA, 20 bp, synthetic construct
  misc_feature 1..20: note = chemically synthesized
  source 1..20: mol_type = other DNA
gcttcccacagcctgagggc

SEQ ID NO: 57918 - DNA, 20 bp, synthetic construct
  misc_feature 1..20: note = chemically synthesized
  source 1..20: mol_type = other DNA
tcccacagcctgagggccag

SEQ ID NO: 57919 - DNA, 20 bp, synthetic construct
  misc_feature 1..20: note = chemically synthesized
  source 1..20: mol_type = other DNA
acagcctgagggccagaagc

SEQ ID NO: 57920 - DNA, 20 bp, synthetic construct
  misc_feature 1..20: note = chemically synthesized
  source 1..20: mol_type = other DNA
gcctgagggccagaagctgg

SEQ ID NO: 57921 - DNA, 20 bp, synthetic construct
  misc_feature 1..20: note = chemically synthesized
  source 1..20: mol_type = other DNA
ctgagggccagaagctggca

SEQ ID NO: 57922 - DNA, 20 bp, synthetic construct
  misc_feature 1..20: note = chemically synthesized
  source 1..20: mol_type = other DNA
cagaagctggcagagttgtt

SEQ ID NO: 57923 - DNA, 20 bp, synthetic construct
  misc_feature 1..20: note = chemically synthesized
  source 1..20: mol_type = other DNA
gagcaaactcgccccgcaca

SEQ ID NO: 57924 - DNA, 20 bp, synthetic construct
  misc_feature 1..20: note = chemically synthesized
  source 1..20: mol_type = other DNA
aaactcgccccgcacacggt

SEQ ID NO: 57925 - DNA, 20 bp, synthetic construct
  misc_feature 1..20: note = chemically synthesized
  source 1..20: mol_type = other DNA
ctcgccccgcacacggtcgg

SEQ ID NO: 57926 - DNA, 20 bp, synthetic construct
  misc_feature 1..20: note = chemically synthesized
  source 1..20: mol_type = other DNA
ccccgcacacggtcggcaga

SEQ ID NO: 57927 - DNA, 20 bp, synthetic construct
  misc_feature 1..20: note = chemically synthesized
  source 1..20: mol_type = other DNA
gcacacggtcggcagacagc

SEQ ID NO: 57928 - DNA, 20 bp, synthetic construct
  misc_feature 1..20: note = chemically synthesized
  source 1..20: mol_type = other DNA
cacacggtcggcagacagcc

SEQ ID NO: 57929 - DNA, 20 bp, synthetic construct
  misc_feature 1..20: note = chemically synthesized
  source 1..20: mol_type = other DNA
acggtcggcagacagccagg

SEQ ID NO: 57930 - DNA, 20 bp, synthetic construct
  misc_feature 1..20: note = chemically synthesized
  source 1..20: mol_type = other DNA
cggtcggcagacagccaggt

SEQ ID NO: 57931 - DNA, 20 bp, synthetic construct
  misc_feature 1..20: note = chemically synthesized
  source 1..20: mol_type = other DNA
ggcagacagccaggtgggct

SEQ ID NO: 57932 - DNA, 20 bp, synthetic construct
  misc_feature 1..20: note = chemically synthesized
  source 1..20: mol_type = other DNA
gcagacagccaggtgggctg

SEQ ID NO: 57933 - DNA, 20 bp, synthetic construct
  misc_feature 1..20: note = chemically synthesized
  source 1..20: mol_type = other DNA
agccaggtgggctgaggcgc

SEQ ID NO: 57934 - DNA, 20 bp, synthetic construct
  misc_feature 1..20: note = chemically synthesized
  source 1..20: mol_type = other DNA
gccaggtgggctgaggcgcc

SEQ ID NO: 57935 - DNA, 20 bp, synthetic construct
  misc_feature 1..20: note = chemically synthesized
  source 1..20: mol_type = other DNA
gtgggctgaggcgccgggct

SEQ ID NO: 57936 - DNA, 20 bp, synthetic construct
  misc_feature 1..20: note = chemically synthesized
  source 1..20: mol_type = other DNA
tgaggcgccgggctcagctc

SEQ ID NO: 57937 - DNA, 20 bp, synthetic construct
  misc_feature 1..20: note = chemically synthesized
  source 1..20: mol_type = other DNA
gaggcgccgggctcagctcc

SEQ ID NO: 57938 - DNA, 20 bp, synthetic construct
  misc_feature 1..20: note = chemically synthesized
  source 1..20: mol_type = other DNA
aggcgccgggctcagctccg

SEQ ID NO: 57939 - DNA, 20 bp, synthetic construct
  misc_feature 1..20: note = chemically synthesized
  source 1..20: mol_type = other DNA
cgggctcagctccggggtcc

SEQ ID NO: 57940 - DNA, 20 bp, synthetic construct
  misc_feature 1..20: note = chemically synthesized
  source 1..20: mol_type = other DNA
cagctccggggtcccagtac

SEQ ID NO: 57941 - DNA, 20 bp, synthetic construct
  misc_feature 1..20: note = chemically synthesized
  source 1..20: mol_type = other DNA
agctccggggtcccagtacc

SEQ ID NO: 57942 - DNA, 20 bp, synthetic construct
  misc_feature 1..20: note = chemically synthesized
  source 1..20: mol_type = other DNA
agtaccaggcgcaccacctc

SEQ ID NO: 57943 - DNA, 20 bp, synthetic construct
  misc_feature 1..20: note = chemically synthesized
  source 1..20: mol_type = other DNA
aggcgcaccacctccggctc

SEQ ID NO: 57944 - DNA, 20 bp, synthetic construct
  misc_feature 1..20: note = chemically synthesized
  source 1..20: mol_type = other DNA
gcgcaccacctccggctcca

SEQ ID NO: 57945 - DNA, 20 bp, synthetic construct
  misc_feature 1..20: note = chemically synthesized
  source 1..20: mol_type = other DNA
acctccggctccagagcacc

SEQ ID NO: 57946 - DNA, 20 bp, synthetic construct
  misc_feature 1..20: note = chemically synthesized
  source 1..20: mol_type = other DNA
cctccggctccagagcacca

SEQ ID NO: 57947 - DNA, 20 bp, synthetic construct
  misc_feature 1..20: note = chemically synthesized
  source 1..20: mol_type = other DNA
ctccggctccagagcaccaa

SEQ ID NO: 57948 - DNA, 20 bp, synthetic construct
  misc_feature 1..20: note = chemically synthesized
  source 1..20: mol_type = other DNA
ccaagggcccttccctgcct

SEQ ID NO: 57949 - DNA, 20 bp, synthetic construct
  misc_feature 1..20: note = chemically synthesized
  source 1..20: mol_type = other DNA
ccttccctgcctgagtccta

SEQ ID NO: 57950 - DNA, 20 bp, synthetic construct
  misc_feature 1..20: note = chemically synthesized
  source 1..20: mol_type = other DNA
cttccctgcctgagtcctaa

SEQ ID NO: 57951 - DNA, 20 bp, synthetic construct
  misc_feature 1..20: note = chemically synthesized
  source 1..20: mol_type = other DNA
tgagtcctaaaggacgccaa

SEQ ID NO: 57952 - DNA, 20 bp, synthetic construct
  misc_feature 1..20: note = chemically synthesized
  source 1..20: mol_type = other DNA
gagtcctaaaggacgccaat

SEQ ID NO: 57953 - DNA, 20 bp, synthetic construct
  misc_feature 1..20: note = chemically synthesized
  source 1..20: mol_type = other DNA
aaaggacgccaatgggcctc

SEQ ID NO: 57954 - DNA, 20 bp, synthetic construct
  misc_feature 1..20: note = chemically synthesized
  source 1..20: mol_type = other DNA
ccccttctcccctgcccctt

SEQ ID NO: 57955 - DNA, 20 bp, synthetic construct
  misc_feature 1..20: note = chemically synthesized
  source 1..20: mol_type = other DNA
ttctcccctgccccttcagc

SEQ ID NO: 57956 - DNA, 20 bp, synthetic construct
  misc_feature 1..20: note = chemically synthesized
  source 1..20: mol_type = other DNA
cttcagctggttcttttctt

SEQ ID NO: 57957 - DNA, 20 bp, synthetic construct
  misc_feature 1..20: note = chemically synthesized
  source 1..20: mol_type = other DNA
gttcttttcttcggctgaaa

SEQ ID NO: 57958 - DNA, 20 bp, synthetic construct
  misc_feature 1..20: note = chemically synthesized
  source 1..20: mol_type = other DNA
ttttcttcggctgaaacaga

SEQ ID NO: 57959 - DNA, 20 bp, synthetic construct
  misc_feature 1..20: note = chemically synthesized
  source 1..20: mol_type = other DNA
ggctgaaacagatggaatac

SEQ ID NO: 57960 - DNA, 20 bp, synthetic construct
  misc_feature 1..20: note = chemically synthesized
  source 1..20: mol_type = other DNA
ctgaaacagatggaatacta

SEQ ID NO: 57961 - DNA, 20 bp, synthetic construct
  misc_feature 1..20: note = chemically synthesized
  source 1..20: mol_type = other DNA
cagatggaatactagagcat

SEQ ID NO: 57962 - DNA, 20 bp, synthetic construct
  misc_feature 1..20: note = chemically synthesized
  source 1..20: mol_type = other DNA
agcatgagttctgtgtcata

SEQ ID NO: 57963 - DNA, 20 bp, synthetic construct
  misc_feature 1..20: note = chemically synthesized
  source 1..20: mol_type = other DNA
aagaaattgcctcgtgctcc

SEQ ID NO: 57964 - DNA, 20 bp, synthetic construct
  misc_feature 1..20: note = chemically synthesized
  source 1..20: mol_type = other DNA
ttcccaccccgcccctgtct

SEQ ID NO: 57965 - DNA, 20 bp, synthetic construct
  misc_feature 1..20: note = chemically synthesized
  source 1..20: mol_type = other DNA
tcccaccccgcccctgtctc

SEQ ID NO: 57966 - DNA, 20 bp, synthetic construct
  misc_feature 1..20: note = chemically synthesized
  source 1..20: mol_type = other DNA
caccccgcccctgtctcggg

SEQ ID NO: 57967 - DNA, 20 bp, synthetic construct
  misc_feature 1..20: note = chemically synthesized
  source 1..20: mol_type = other DNA
accccgcccctgtctcgggt

SEQ ID NO: 57968 - DNA, 20 bp, synthetic construct
  misc_feature 1..20: note = chemically synthesized
  source 1..20: mol_type = other DNA
ccccgcccctgtctcgggta

SEQ ID NO: 57969 - DNA, 20 bp, synthetic construct
  misc_feature 1..20: note = chemically synthesized
  source 1..20: mol_type = other DNA
ctcgggtagggccttctctc

SEQ ID NO: 57970 - DNA, 20 bp, synthetic construct
  misc_feature 1..20: note = chemically synthesized
  source 1..20: mol_type = other DNA
tcgggtagggccttctctcc

SEQ ID NO: 57971 - DNA, 20 bp, synthetic construct
  misc_feature 1..20: note = chemically synthesized
  source 1..20: mol_type = other DNA
ccatgttttccaaaccaaat

SEQ ID NO: 57972 - DNA, 20 bp, synthetic construct
  misc_feature 1..20: note = chemically synthesized
  source 1..20: mol_type = other DNA
caaatcggaacccactataa

SEQ ID NO: 57973 - DNA, 20 bp, synthetic construct
  misc_feature 1..20: note = chemically synthesized
  source 1..20: mol_type = other DNA
tcggaacccactataatggc

SEQ ID NO: 57974 - DNA, 20 bp, synthetic construct
  misc_feature 1..20: note = chemically synthesized
  source 1..20: mol_type = other DNA
aagcccgctttctctgtgcc

SEQ ID NO: 57975 - DNA, 20 bp, synthetic construct
  misc_feature 1..20: note = chemically synthesized
  source 1..20: mol_type = other DNA
cgctttctctgtgcctggtg

SEQ ID NO: 57976 - DNA, 20 bp, synthetic construct
  misc_feature 1..20: note = chemically synthesized
  source 1..20: mol_type = other DNA
tctgtgcctggtgcagttcc

SEQ ID NO: 57977 - DNA, 20 bp, synthetic construct
  misc_feature 1..20: note = chemically synthesized
  source 1..20: mol_type = other DNA
gtgcagttcccagtacgttc

SEQ ID NO: 57978 - DNA, 20 bp, synthetic construct
  misc_feature 1..20: note = chemically synthesized
  source 1..20: mol_type = other DNA
tgcagttcccagtacgttcc

SEQ ID NO: 57979 - DNA, 20 bp, synthetic construct
  misc_feature 1..20: note = chemically synthesized
  source 1..20: mol_type = other DNA
tccttcacccacctgtgccg

SEQ ID NO: 57980 - DNA, 20 bp, synthetic construct
  misc_feature 1..20: note = chemically synthesized
  source 1..20: mol_type = other DNA
tcacccacctgtgccgcggc

SEQ ID NO: 57981 - DNA, 20 bp, synthetic construct
  misc_feature 1..20: note = chemically synthesized
  source 1..20: mol_type = other DNA
cacccacctgtgccgcggcg

SEQ ID NO: 57982 - DNA, 20 bp, synthetic construct
  misc_feature 1..20: note = chemically synthesized
  source 1..20: mol_type = other DNA
ccacctgtgccgcggcgagg

SEQ ID NO: 57983 - DNA, 20 bp, synthetic construct
  misc_feature 1..20: note = chemically synthesized
  source 1..20: mol_type = other DNA
tgccgcggcgaggcagaaac

SEQ ID NO: 57984 - DNA, 20 bp, synthetic construct
  misc_feature 1..20: note = chemically synthesized
  source 1..20: mol_type = other DNA
gccgcggcgaggcagaaact

SEQ ID NO: 57985 - DNA, 20 bp, synthetic construct
  misc_feature 1..20: note = chemically synthesized
  source 1..20: mol_type = other DNA
gaggcagaaactgggaaatc

SEQ ID NO: 57986 - DNA, 20 bp, synthetic construct
  misc_feature 1..20: note = chemically synthesized
  source 1..20: mol_type = other DNA
aggcagaaactgggaaatct

SEQ ID NO: 57987 - DNA, 20 bp, synthetic construct
  misc_feature 1..20: note = chemically synthesized
  source 1..20: mol_type = other DNA
cagaaactgggaaatctggg

SEQ ID NO: 57988 - DNA, 20 bp, synthetic construct
  misc_feature 1..20: note = chemically synthesized
  source 1..20: mol_type = other DNA
agaaactgggaaatctgggc

SEQ ID NO: 57989 - DNA, 20 bp, synthetic construct
  misc_feature 1..20: note = chemically synthesized
  source 1..20: mol_type = other DNA
gaaatctgggcaggatatcc

SEQ ID NO: 57990 - DNA, 20 bp, synthetic construct
  misc_feature 1..20: note = chemically synthesized
  source 1..20: mol_type = other DNA
atctgggcaggatatcctgg

SEQ ID NO: 57991 - DNA, 20 bp, synthetic construct
  misc_feature 1..20: note = chemically synthesized
  source 1..20: mol_type = other DNA
gtgctctgctcgcccttcct

SEQ ID NO: 57992 - DNA, 20 bp, synthetic construct
  misc_feature 1..20: note = chemically synthesized
  source 1..20: mol_type = other DNA
gctcgcccttcctcggcctc

SEQ ID NO: 57993 - DNA, 20 bp, synthetic construct
  misc_feature 1..20: note = chemically synthesized
  source 1..20: mol_type = other DNA
ctcgcccttcctcggcctcc

SEQ ID NO: 57994 - DNA, 20 bp, synthetic construct
  misc_feature 1..20: note = chemically synthesized
  source 1..20: mol_type = other DNA
ccgcgaaccttcccactgaa

SEQ ID NO: 57995 - DNA, 20 bp, synthetic construct
  misc_feature 1..20: note = chemically synthesized
  source 1..20: mol_type = other DNA
aaccttcccactgaatagcg

SEQ ID NO: 57996 - DNA, 20 bp, synthetic construct
  misc_feature 1..20: note = chemically synthesized
  source 1..20: mol_type = other DNA
aatagcgcagccgcacgccc

SEQ ID NO: 57997 - DNA, 20 bp, synthetic construct
  misc_feature 1..20: note = chemically synthesized
  source 1..20: mol_type = other DNA
gcgcagccgcacgccccagc

SEQ ID NO: 57998 - DNA, 20 bp, synthetic construct
  misc_feature 1..20: note = chemically synthesized
  source 1..20: mol_type = other DNA
cacgccccagcaagtcccca

SEQ ID NO: 57999 - DNA, 20 bp, synthetic construct
  misc_feature 1..20: note = chemically synthesized
  source 1..20: mol_type = other DNA
cgccccagcaagtccccaaa

SEQ ID NO: 58000 - DNA, 20 bp, synthetic construct
  misc_feature 1..20: note = chemically synthesized
  source 1..20: mol_type = other DNA
ccagcaagtccccaaagagc

SEQ ID NO: 58001 - DNA, 20 bp, synthetic construct
  misc_feature 1..20: note = chemically synthesized
  source 1..20: mol_type = other DNA
ctcccccgccgccttgcctg

SEQ ID NO: 58002 - DNA, 20 bp, synthetic construct
  misc_feature 1..20: note = chemically synthesized
  source 1..20: mol_type = other DNA
ccgccttgcctgcagtcccc

SEQ ID NO: 58003 - DNA, 20 bp, synthetic construct
  misc_feature 1..20: note = chemically synthesized
  source 1..20: mol_type = other DNA
gcagtccccaagatcgtgcc

SEQ ID NO: 58004 - DNA, 20 bp, synthetic construct
  misc_feature 1..20: note = chemically synthesized
  source 1..20: mol_type = other DNA
ccccaagatcgtgccaagcg

SEQ ID NO: 58005 - DNA, 20 bp, synthetic construct
  misc_feature 1..20: note = chemically synthesized
  source 1..20: mol_type = other DNA
ccaagatcgtgccaagcgaa

SEQ ID NO: 58006 - DNA, 20 bp, synthetic construct
  misc_feature 1..20: note = chemically synthesized
  source 1..20: mol_type = other DNA
cgtgccaagcgaagagccct

SEQ ID NO: 58007 - DNA, 20 bp, synthetic construct
  misc_feature 1..20: note = chemically synthesized
  source 1..20: mol_type = other DNA
actccacttcctctcttaca

SEQ ID NO: 58008 - DNA, 20 bp, synthetic construct
  misc_feature 1..20: note = chemically synthesized
  source 1..20: mol_type = other DNA
ctccacttcctctcttacat

SEQ ID NO: 58009 - DNA, 20 bp, synthetic construct
  misc_feature 1..20: note = chemically synthesized
  source 1..20: mol_type = other DNA
tccacttcctctcttacatg

SEQ ID NO: 58010 - DNA, 20 bp, synthetic construct
  misc_feature 1..20: note = chemically synthesized
  source 1..20: mol_type = other DNA
ccacttcctctcttacatgg

SEQ ID NO: 58011 - DNA, 20 bp, synthetic construct
  misc_feature 1..20: note = chemically synthesized
  source 1..20: mol_type = other DNA
cacttcctctcttacatggg

SEQ ID NO: 58012 - DNA, 20 bp, synthetic construct
  misc_feature 1..20: note = chemically synthesized
  source 1..20: mol_type = other DNA
ctcttacatggggggaaact

SEQ ID NO: 58013 - DNA, 20 bp, synthetic construct
  misc_feature 1..20: note = chemically synthesized
  source 1..20: mol_type = other DNA
tcttacatggggggaaactg

SEQ ID NO: 58014 - DNA, 20 bp, synthetic construct
  misc_feature 1..20: note = chemically synthesized
  source 1..20: mol_type = other DNA
atggggggaaactgaggccc

SEQ ID NO: 58015 - DNA, 20 bp, synthetic construct
  misc_feature 1..20: note = chemically synthesized
  source 1..20: mol_type = other DNA
ggggggaaactgaggcccga

SEQ ID NO: 58016 - DNA, 20 bp, synthetic construct
  misc_feature 1..20: note = chemically synthesized
  source 1..20: mol_type = other DNA
gggggaaactgaggcccgag

SEQ ID NO: 58017 - DNA, 20 bp, synthetic construct
  misc_feature 1..20: note = chemically synthesized
  source 1..20: mol_type = other DNA
aactgaggcccgagaggaaa

SEQ ID NO: 58018 - DNA, 20 bp, synthetic construct
  misc_feature 1..20: note = chemically synthesized
  source 1..20: mol_type = other DNA
gaaacagcaccgcaccgtcc

SEQ ID NO: 58019 - DNA, 20 bp, synthetic construct
  misc_feature 1..20: note = chemically synthesized
  source 1..20: mol_type = other DNA
gcaccgcaccgtcccggctg

SEQ ID NO: 58020 - DNA, 20 bp, synthetic construct
  misc_feature 1..20: note = chemically synthesized
  source 1..20: mol_type = other DNA
caccgcaccgtcccggctgc

SEQ ID NO: 58021 - DNA, 20 bp, synthetic construct
  misc_feature 1..20: note = chemically synthesized
  source 1..20: mol_type = other DNA
tcccggctgcgggttcgccc

SEQ ID NO: 58022 - DNA, 20 bp, synthetic construct
  misc_feature 1..20: note = chemically synthesized
  source 1..20: mol_type = other DNA
ccatccctacacccgcacct

SEQ ID NO: 58023 - DNA, 20 bp, synthetic construct
  misc_feature 1..20: note = chemically synthesized
  source 1..20: mol_type = other DNA
cctacacccgcaccttggcg

SEQ ID NO: 58024 - DNA, 20 bp, synthetic construct
  misc_feature 1..20: note = chemically synthesized
  source 1..20: mol_type = other DNA
acacccgcaccttggcgcag

SEQ ID NO: 58025 - DNA, 20 bp, synthetic construct
  misc_feature 1..20: note = chemically synthesized
  source 1..20: mol_type = other DNA
cccgcaccttggcgcagcgg

SEQ ID NO: 58026 - DNA, 20 bp, synthetic construct
  misc_feature 1..20: note = chemically synthesized
  source 1..20: mol_type = other DNA
gcaccttggcgcagcggtgg

SEQ ID NO: 58027 - DNA, 20 bp, synthetic construct
  misc_feature 1..20: note = chemically synthesized
  source 1..20: mol_type = other DNA
caccttggcgcagcggtgga

SEQ ID NO: 58028 - DNA, 20 bp, synthetic construct
  misc_feature 1..20: note = chemically synthesized
  source 1..20: mol_type = other DNA
cttggcgcagcggtggaagg

SEQ ID NO: 58029 - DNA, 20 bp, synthetic construct
  misc_feature 1..20: note = chemically synthesized
  source 1..20: mol_type = other DNA
gcagcggtggaaggtggctg

SEQ ID NO: 58030 - DNA, 20 bp, synthetic construct
  misc_feature 1..20: note = chemically synthesized
  source 1..20: mol_type = other DNA
ggtggctgtggttccgtgct

SEQ ID NO: 58031 - DNA, 20 bp, synthetic construct
  misc_feature 1..20: note = chemically synthesized
  source 1..20: mol_type = other DNA
gtggctgtggttccgtgctc

SEQ ID NO: 58032 - DNA, 20 bp, synthetic construct
  misc_feature 1..20: note = chemically synthesized
  source 1..20: mol_type = other DNA
ggttccgtgctcgggtgctt

SEQ ID NO: 58033 - DNA, 20 bp, synthetic construct
  misc_feature 1..20: note = chemically synthesized
  source 1..20: mol_type = other DNA
ccgtgctcgggtgcttcggc

SEQ ID NO: 58034 - DNA, 20 bp, synthetic construct
  misc_feature 1..20: note = chemically synthesized
  source 1..20: mol_type = other DNA
cgtgctcgggtgcttcggcc

SEQ ID NO: 58035 - DNA, 20 bp, synthetic construct
  misc_feature 1..20: note = chemically synthesized
  source 1..20: mol_type = other DNA
ttcggccaggccgtcctcct

SEQ ID NO: 58036 - DNA, 20 bp, synthetic construct
  misc_feature 1..20: note = chemically synthesized
  source 1..20: mol_type = other DNA
ggccgtcctcctcggaacgc

SEQ ID NO: 58037 - DNA, 20 bp, synthetic construct
  misc_feature 1..20: note = chemically synthesized
  source 1..20: mol_type = other DNA
gccgtcctcctcggaacgca

SEQ ID NO: 58038 - DNA, 20 bp, synthetic construct
  misc_feature 1..20: note = chemically synthesized
  source 1..20: mol_type = other DNA
tcctcctcggaacgcaaggc

SEQ ID NO: 58039 - DNA, 20 bp, synthetic construct
  misc_feature 1..20: note = chemically synthesized
  source 1..20: mol_type = other DNA
tcggaacgcaaggctagcac

SEQ ID NO: 58040 - DNA, 20 bp, synthetic construct
  misc_feature 1..20: note = chemically synthesized
  source 1..20: mol_type = other DNA
aggctagcaccagctcctcg

SEQ ID NO: 58041 - DNA, 20 bp, synthetic construct
  misc_feature 1..20: note = chemically synthesized
  source 1..20: mol_type = other DNA
cgtcctcgtcctcctgcgca

SEQ ID NO: 58042 - DNA, 20 bp, synthetic construct
  misc_feature 1..20: note = chemically synthesized
  source 1..20: mol_type = other DNA
gtcctcgtcctcctgcgcac

SEQ ID NO: 58043 - DNA, 20 bp, synthetic construct
  misc_feature 1..20: note = chemically synthesized
  source 1..20: mol_type = other DNA
ctcctgcgcacgggcgcccg

SEQ ID NO: 58044 - DNA, 20 bp, synthetic construct
  misc_feature 1..20: note = chemically synthesized
  source 1..20: mol_type = other DNA
tcctgcgcacgggcgcccgc

SEQ ID NO: 58045 - DNA, 20 bp, synthetic construct
  misc_feature 1..20: note = chemically synthesized
  source 1..20: mol_type = other DNA
gcacgggcgcccgcgggacc

SEQ ID NO: 58046 - DNA, 20 bp, synthetic construct
  misc_feature 1..20: note = chemically synthesized
  source 1..20: mol_type = other DNA
cacgggcgcccgcgggaccc

SEQ ID NO: 58047 - DNA, 20 bp, synthetic construct
  misc_feature 1..20: note = chemically synthesized
  source 1..20: mol_type = other DNA
cgggcgcccgcgggacccag

SEQ ID NO: 58048 - DNA, 20 bp, synthetic construct
  misc_feature 1..20: note = chemically synthesized
  source 1..20: mol_type = other DNA
gcgcccgcgggacccaggag

SEQ ID NO: 58049 - DNA, 20 bp, synthetic construct
  misc_feature 1..20: note = chemically synthesized
  source 1..20: mol_type = other DNA
cccgcgggacccaggagcag

SEQ ID NO: 58050 - DNA, 20 bp, synthetic construct
  misc_feature 1..20: note = chemically synthesized
  source 1..20: mol_type = other DNA
gcgggacccaggagcagcag

SEQ ID NO: 58051 - DNA, 20 bp, synthetic construct
  misc_feature 1..20: note = chemically synthesized
  source 1..20: mol_type = other DNA
ggacccaggagcagcagcag

SEQ ID NO: 58052 - DNA, 20 bp, synthetic construct
  misc_feature 1..20: note = chemically synthesized
  source 1..20: mol_type = other DNA
cccaggagcagcagcagcag

SEQ ID NO: 58053 - DNA, 20 bp, synthetic construct
  misc_feature 1..20: note = chemically synthesized
  source 1..20: mol_type = other DNA
aggagcagcagcagcagcag

SEQ ID NO: 58054 - DNA, 20 bp, synthetic construct
  misc_feature 1..20: note = chemically synthesized
  source 1..20: mol_type = other DNA
agcagcagcagcagcagcag

SEQ ID NO: 58055 - DNA, 20 bp, synthetic construct
  misc_feature 1..20: note = chemically synthesized
  source 1..20: mol_type = other DNA
agcagcagcagcagcagcag

SEQ ID NO: 58056 - DNA, 20 bp, synthetic construct
  misc_feature 1..20: note = chemically synthesized
  source 1..20: mol_type = other DNA
agcagcagcagcagcagtgg

SEQ ID NO: 58057 - DNA, 20 bp, synthetic construct
  misc_feature 1..20: note = chemically synthesized
  source 1..20: mol_type = other DNA
agcagcagcagcagtggcag

SEQ ID NO: 58058 - DNA, 20 bp, synthetic construct
  misc_feature 1..20: note = chemically synthesized
  source 1..20: mol_type = other DNA
gcagcagtggcagcggccac

SEQ ID NO: 58059 - DNA, 20 bp, synthetic construct
  misc_feature 1..20: note = chemically synthesized
  source 1..20: mol_type = other DNA
cagcagtggcagcggccacc

SEQ ID NO: 58060 - DNA, 20 bp, synthetic construct
  misc_feature 1..20: note = chemically synthesized
  source 1..20: mol_type = other DNA
cagcggccaccaggaccgcc

SEQ ID NO: 58061 - DNA, 20 bp, synthetic construct
  misc_feature 1..20: note = chemically synthesized
  source 1..20: mol_type = other DNA
gcggccaccaggaccgcctg

SEQ ID NO: 58062 - DNA, 20 bp, synthetic construct
  misc_feature 1..20: note = chemically synthesized
  source 1..20: mol_type = other DNA
ccaggaccgcctggagctga

SEQ ID NO: 58063 - DNA, 20 bp, synthetic construct
  misc_feature 1..20: note = chemically synthesized
  source 1..20: mol_type = other DNA
ctggagctgacggtgcccat

SEQ ID NO: 58064 - DNA, 20 bp, synthetic construct
  misc_feature 1..20: note = chemically synthesized
  source 1..20: mol_type = other DNA
tggagctgacggtgcccatg

SEQ ID NO: 58065 - DNA, 20 bp, synthetic construct
  misc_feature 1..20: note = chemically synthesized
  source 1..20: mol_type = other DNA
ggagctgacggtgcccatga

SEQ ID NO: 58066 - DNA, 20 bp, synthetic construct
  misc_feature 1..20: note = chemically synthesized
  source 1..20: mol_type = other DNA
ctgacggtgcccatgagggc

SEQ ID NO: 58067 - DNA, 20 bp, synthetic construct
  misc_feature 1..20: note = chemically synthesized
  source 1..20: mol_type = other DNA
tgacggtgcccatgagggcc

SEQ ID NO: 58068 - DNA, 20 bp, synthetic construct
  misc_feature 1..20: note = chemically synthesized
  source 1..20: mol_type = other DNA
gacggtgcccatgagggcca

SEQ ID NO: 58069 - DNA, 20 bp, synthetic construct
  misc_feature 1..20: note = chemically synthesized
  source 1..20: mol_type = other DNA
acggtgcccatgagggccag

SEQ ID NO: 58070 - DNA, 20 bp, synthetic construct
  misc_feature 1..20: note = chemically synthesized
  source 1..20: mol_type = other DNA
ggtgcccatgagggccaggg

SEQ ID NO: 58071 - DNA, 20 bp, synthetic construct
  misc_feature 1..20: note = chemically synthesized
  source 1..20: mol_type = other DNA
tgcccatgagggccagggga

SEQ ID NO: 58072 - DNA, 20 bp, synthetic construct
  misc_feature 1..20: note = chemically synthesized
  source 1..20: mol_type = other DNA
gcccatgagggccaggggag

SEQ ID NO: 58073 - DNA, 20 bp, synthetic construct
  misc_feature 1..20: note = chemically synthesized
  source 1..20: mol_type = other DNA
caggggagaggttgctgtcc

SEQ ID NO: 58074 - DNA, 20 bp, synthetic construct
  misc_feature 1..20: note = chemically synthesized
  source 1..20: mol_type = other DNA
ggagaggttgctgtcctggc

SEQ ID NO: 58075 - DNA, 20 bp, synthetic construct
  misc_feature 1..20: note = chemically synthesized
  source 1..20: mol_type = other DNA
gagaggttgctgtcctggcg

SEQ ID NO: 58076 - DNA, 20 bp, synthetic construct
  misc_feature 1..20: note = chemically synthesized
  source 1..20: mol_type = other DNA
gaggttgctgtcctggcgag

SEQ ID NO: 58077 - DNA, 20 bp, synthetic construct
  misc_feature 1..20: note = chemically synthesized
  source 1..20: mol_type = other DNA
gctgtcctggcgaggagacc

SEQ ID NO: 58078 - DNA, 20 bp, synthetic construct
  misc_feature 1..20: note = chemically synthesized
  source 1..20: mol_type = other DNA
tgtcctggcgaggagaccta

SEQ ID NO: 58079 - DNA, 20 bp, synthetic construct
  misc_feature 1..20: note = chemically synthesized
  source 1..20: mol_type = other DNA
gtcctggcgaggagacctag

SEQ ID NO: 58080 - DNA, 20 bp, synthetic construct
  misc_feature 1..20: note = chemically synthesized
  source 1..20: mol_type = other DNA
ggagacctagaggccgtgcg

SEQ ID NO: 58081 - DNA, 20 bp, synthetic construct
  misc_feature 1..20: note = chemically synthesized
  source 1..20: mol_type = other DNA
aggccgtgcgcggtccacgc

SEQ ID NO: 58082 - DNA, 20 bp, synthetic construct
  misc_feature 1..20: note = chemically synthesized
  source 1..20: mol_type = other DNA
ccgtgcgcggtccacgccgg

SEQ ID NO: 58083 - DNA, 20 bp, synthetic construct
  misc_feature 1..20: note = chemically synthesized
  source 1..20: mol_type = other DNA
gtccacgccggcggcgcctt

SEQ ID NO: 58084 - DNA, 20 bp, synthetic construct
  misc_feature 1..20: note = chemically synthesized
  source 1..20: mol_type = other DNA
cggcggcgccttgagccttg

SEQ ID NO: 58085 - DNA, 20 bp, synthetic construct
  misc_feature 1..20: note = chemically synthesized
  source 1..20: mol_type = other DNA
cggcgccttgagccttgcgg

SEQ ID NO: 58086 - DNA, 20 bp, synthetic construct
  misc_feature 1..20: note = chemically synthesized
  source 1..20: mol_type = other DNA
ggcgccttgagccttgcggt

SEQ ID NO: 58087 - DNA, 20 bp, synthetic construct
  misc_feature 1..20: note = chemically synthesized
  source 1..20: mol_type = other DNA
gcgccttgagccttgcggtg

SEQ ID NO: 58088 - DNA, 20 bp, synthetic construct
  misc_feature 1..20: note = chemically synthesized
  source 1..20: mol_type = other DNA
gccttgagccttgcggtggg

SEQ ID NO: 58089 - DNA, 20 bp, synthetic construct
  misc_feature 1..20: note = chemically synthesized
  source 1..20: mol_type = other DNA
ccttgagccttgcggtgggg

SEQ ID NO: 58090 - DNA, 20 bp, synthetic construct
  misc_feature 1..20: note = chemically synthesized
  source 1..20: mol_type = other DNA
ttgcggtggggaggactgtg

SEQ ID NO: 58091 - DNA, 20 bp, synthetic construct
  misc_feature 1..20: note = chemically synthesized
  source 1..20: mol_type = other DNA
tgcggtggggaggactgtgc

SEQ ID NO: 58092 - DNA, 20 bp, synthetic construct
  misc_feature 1..20: note = chemically synthesized
  source 1..20: mol_type = other DNA
cggtggggaggactgtgcag

SEQ ID NO: 58093 - DNA, 20 bp, synthetic construct
  misc_feature 1..20: note = chemically synthesized
  source 1..20: mol_type = other DNA
ggaggactgtgcaggagctg

SEQ ID NO: 58094 - DNA, 20 bp, synthetic construct
  misc_feature 1..20: note = chemically synthesized
  source 1..20: mol_type = other DNA
actgtgcaggagctgaagtt

SEQ ID NO: 58095 - DNA, 20 bp, synthetic construct
  misc_feature 1..20: note = chemically synthesized
  source 1..20: mol_type = other DNA
ctgtgcaggagctgaagttc

SEQ ID NO: 58096 - DNA, 20 bp, synthetic construct
  misc_feature 1..20: note = chemically synthesized
  source 1..20: mol_type = other DNA
gtgcaggagctgaagttcag

SEQ ID NO: 58097 - DNA, 20 bp, synthetic construct
  misc_feature 1..20: note = chemically synthesized
  source 1..20: mol_type = other DNA
caggagctgaagttcaggag

SEQ ID NO: 58098 - DNA, 20 bp, synthetic construct
  misc_feature 1..20: note = chemically synthesized
  source 1..20: mol_type = other DNA
aggagctgaagttcaggagc

SEQ ID NO: 58099 - DNA, 20 bp, synthetic construct
  misc_feature 1..20: note = chemically synthesized
  source 1..20: mol_type = other DNA
ggagctgaagttcaggagca

SEQ ID NO: 58100 - DNA, 20 bp, synthetic construct
  misc_feature 1..20: note = chemically synthesized
  source 1..20: mol_type = other DNA
gttcaggagcagggcgcgtg

SEQ ID NO: 58101 - DNA, 20 bp, synthetic construct
  misc_feature 1..20: note = chemically synthesized
  source 1..20: mol_type = other DNA
ttcaggagcagggcgcgtga

SEQ ID NO: 58102 - DNA, 20 bp, synthetic construct
  misc_feature 1..20: note = chemically synthesized
  source 1..20: mol_type = other DNA
tcaggagcagggcgcgtgaa

SEQ ID NO: 58103 - DNA, 20 bp, synthetic construct
  misc_feature 1..20: note = chemically synthesized
  source 1..20: mol_type = other DNA
caggagcagggcgcgtgaag

SEQ ID NO: 58104 - DNA, 20 bp, synthetic construct
  misc_feature 1..20: note = chemically synthesized
  source 1..20: mol_type = other DNA
agggcgcgtgaaggggcgcg

SEQ ID NO: 58105 - DNA, 20 bp, synthetic construct
  misc_feature 1..20: note = chemically synthesized
  source 1..20: mol_type = other DNA
tgaaggggcgcgcggaatcc

SEQ ID NO: 58106 - DNA, 20 bp, synthetic construct
  misc_feature 1..20: note = chemically synthesized
  source 1..20: mol_type = other DNA
ggggcgcgcggaatcctggc

SEQ ID NO: 58107 - DNA, 20 bp, synthetic construct
  misc_feature 1..20: note = chemically synthesized
  source 1..20: mol_type = other DNA
gggcgcgcggaatcctggct

SEQ ID NO: 58108 - DNA, 20 bp, synthetic construct
  misc_feature 1..20: note = chemically synthesized
  source 1..20: mol_type = other DNA
gcgcgcggaatcctggctgg

SEQ ID NO: 58109 - DNA, 20 bp, synthetic construct
  misc_feature 1..20: note = chemically synthesized
  source 1..20: mol_type = other DNA
gcggaatcctggctgggagc

SEQ ID NO: 58110 - DNA, 20 bp, synthetic construct
  misc_feature 1..20: note = chemically synthesized
  source 1..20: mol_type = other DNA
cggaatcctggctgggagct

SEQ ID NO: 58111 - DNA, 20 bp, synthetic construct
  misc_feature 1..20: note = chemically synthesized
  source 1..20: mol_type = other DNA
gaatcctggctgggagctgg

SEQ ID NO: 58112 - DNA, 20 bp, synthetic construct
  misc_feature 1..20: note = chemically synthesized
  source 1..20: mol_type = other DNA
gctgctgcaacgacgcgtcc

SEQ ID NO: 58113 - DNA, 20 bp, synthetic construct
  misc_feature 1..20: note = chemically synthesized
  source 1..20: mol_type = other DNA
cgacgcgtcccggcccgccc

SEQ ID NO: 58114 - DNA, 20 bp, synthetic construct
  misc_feature 1..20: note = chemically synthesized
  source 1..20: mol_type = other DNA
gcgtcccggcccgcccgagc

SEQ ID NO: 58115 - DNA, 20 bp, synthetic construct
  misc_feature 1..20: note = chemically synthesized
  source 1..20: mol_type = other DNA
cccgagccagtctcactgcc

SEQ ID NO: 58116 - DNA, 20 bp, synthetic construct
  misc_feature 1..20: note = chemically synthesized
  source 1..20: mol_type = other DNA
cactgcctggctcactcctc

SEQ ID NO: 58117 - DNA, 20 bp, synthetic construct
  misc_feature 1..20: note = chemically synthesized
  source 1..20: mol_type = other DNA
actgcctggctcactcctcc

SEQ ID NO: 58118 - DNA, 20 bp, synthetic construct
  misc_feature 1..20: note = chemically synthesized
  source 1..20: mol_type = other DNA
ctggctcactcctccaggct

SEQ ID NO: 58119 - DNA, 20 bp, synthetic construct
  misc_feature 1..20: note = chemically synthesized
  source 1..20: mol_type = other DNA
ggctcagaccctgaactgaa

SEQ ID NO: 58120 - DNA, 20 bp, synthetic construct
  misc_feature 1..20: note = chemically synthesized
  source 1..20: mol_type = other DNA
tcagaccctgaactgaacgg

SEQ ID NO: 58121 - DNA, 20 bp, synthetic construct
  misc_feature 1..20: note = chemically synthesized
  source 1..20: mol_type = other DNA
cggcgcccgcctgcaaccat

SEQ ID NO: 58122 - DNA, 20 bp, synthetic construct
  misc_feature 1..20: note = chemically synthesized
  source 1..20: mol_type = other DNA
tgagcgcctcgacgtcgctg

SEQ ID NO: 58123 - DNA, 20 bp, synthetic construct
  misc_feature 1..20: note = chemically synthesized
  source 1..20: mol_type = other DNA
acgtcgctgcggaaaccttc

SEQ ID NO: 58124 - DNA, 20 bp, synthetic construct
  misc_feature 1..20: note = chemically synthesized
  source 1..20: mol_type = other DNA
cgtcgctgcggaaaccttct

SEQ ID NO: 58125 - DNA, 20 bp, synthetic construct
  misc_feature 1..20: note = chemically synthesized
  source 1..20: mol_type = other DNA
gtcgctgcggaaaccttcta

SEQ ID NO: 58126 - DNA, 20 bp, synthetic construct
  misc_feature 1..20: note = chemically synthesized
  source 1..20: mol_type = other DNA
tgcggaaaccttctagggtg

SEQ ID NO: 58127 - DNA, 20 bp, synthetic construct
  misc_feature 1..20: note = chemically synthesized
  source 1..20: mol_type = other DNA
gcggaaaccttctagggtgt

SEQ ID NO: 58128 - DNA, 20 bp, synthetic construct
  misc_feature 1..20: note = chemically synthesized
  source 1..20: mol_type = other DNA
gggtgtgggtgcttgacgcc

SEQ ID NO: 58129 - DNA, 20 bp, synthetic construct
  misc_feature 1..20: note = chemically synthesized
  source 1..20: mol_type = other DNA
ggtgtgggtgcttgacgcct

SEQ ID NO: 58130 - DNA, 20 bp, synthetic construct
  misc_feature 1..20: note = chemically synthesized
  source 1..20: mol_type = other DNA
gtgtgggtgcttgacgcctg

SEQ ID NO: 58131 - DNA, 20 bp, synthetic construct
  misc_feature 1..20: note = chemically synthesized
  source 1..20: mol_type = other DNA
tgcttgacgcctggggcgcg

SEQ ID NO: 58132 - DNA, 20 bp, synthetic construct
  misc_feature 1..20: note = chemically synthesized
  source 1..20: mol_type = other DNA
gggcgcgcagatcacgccac

SEQ ID NO: 58133 - DNA, 20 bp, synthetic construct
  misc_feature 1..20: note = chemically synthesized
  source 1..20: mol_type = other DNA
gcgcgcagatcacgccacca

SEQ ID NO: 58134 - DNA, 20 bp, synthetic construct
  misc_feature 1..20: note = chemically synthesized
  source 1..20: mol_type = other DNA
tcacgccaccagagccccat

SEQ ID NO: 58135 - DNA, 20 bp, synthetic construct
  misc_feature 1..20: note = chemically synthesized
  source 1..20: mol_type = other DNA
cctatctgattaaacattaa

SEQ ID NO: 58136 - DNA, 20 bp, synthetic construct
  misc_feature 1..20: note = chemically synthesized
  source 1..20: mol_type = other DNA
ttaaacattaacggaacccc

SEQ ID NO: 58137 - DNA, 20 bp, synthetic construct
  misc_feature 1..20: note = chemically synthesized
  source 1..20: mol_type = other DNA
cattaacggaacccccggac

SEQ ID NO: 58138 - DNA, 20 bp, synthetic construct
  misc_feature 1..20: note = chemically synthesized
  source 1..20: mol_type = other DNA
ttaacggaacccccggactg

SEQ ID NO: 58139 - DNA, 20 bp, synthetic construct
  misc_feature 1..20: note = chemically synthesized
  source 1..20: mol_type = other DNA
taacggaacccccggactgg

SEQ ID NO: 58140 - DNA, 20 bp, synthetic construct
  misc_feature 1..20: note = chemically synthesized
  source 1..20: mol_type = other DNA
gaacccccggactggaggat

SEQ ID NO: 58141 - DNA, 20 bp, synthetic construct
  misc_feature 1..20: note = chemically synthesized
  source 1..20: mol_type = other DNA
aacccccggactggaggatc

SEQ ID NO: 58142 - DNA, 20 bp, synthetic construct
  misc_feature 1..20: note = chemically synthesized
  source 1..20: mol_type = other DNA
cggactggaggatcaggttt

SEQ ID NO: 58143 - DNA, 20 bp, synthetic construct
  misc_feature 1..20: note = chemically synthesized
  source 1..20: mol_type = other DNA
tcggcctcgccctccccaaa

SEQ ID NO: 58144 - DNA, 20 bp, synthetic construct
  misc_feature 1..20: note = chemically synthesized
  source 1..20: mol_type = other DNA
tcgccctccccaaacagcgt

SEQ ID NO: 58145 - DNA, 20 bp, synthetic construct
  misc_feature 1..20: note = chemically synthesized
  source 1..20: mol_type = other DNA
aaacagcgtcagattacgcg

SEQ ID NO: 58146 - DNA, 20 bp, synthetic construct
  misc_feature 1..20: note = chemically synthesized
  source 1..20: mol_type = other DNA
acagcgtcagattacgcgca

SEQ ID NO: 58147 - DNA, 20 bp, synthetic construct
  misc_feature 1..20: note = chemically synthesized
  source 1..20: mol_type = other DNA
cagcgtcagattacgcgcag

SEQ ID NO: 58148 - DNA, 20 bp, synthetic construct
  misc_feature 1..20: note = chemically synthesized
  source 1..20: mol_type = other DNA
agcgtcagattacgcgcaga

SEQ ID NO: 58149 - DNA, 20 bp, synthetic construct
  misc_feature 1..20: note = chemically synthesized
  source 1..20: mol_type = other DNA
gtcagattacgcgcagaggg

SEQ ID NO: 58150 - DNA, 20 bp, synthetic construct
  misc_feature 1..20: note = chemically synthesized
  source 1..20: mol_type = other DNA
aaaaactcccaaatcctaac

SEQ ID NO: 58151 - DNA, 20 bp, synthetic construct
  misc_feature 1..20: note = chemically synthesized
  source 1..20: mol_type = other DNA
aaaactcccaaatcctaact

SEQ ID NO: 58152 - DNA, 20 bp, synthetic construct
  misc_feature 1..20: note = chemically synthesized
  source 1..20: mol_type = other DNA
ctcccaaatcctaactgggc

SEQ ID NO: 58153 - DNA, 20 bp, synthetic construct
  misc_feature 1..20: note = chemically synthesized
  source 1..20: mol_type = other DNA
ccaaatcctaactgggctgg

SEQ ID NO: 58154 - DNA, 20 bp, synthetic construct
  misc_feature 1..20: note = chemically synthesized
  source 1..20: mol_type = other DNA
caaatcctaactgggctgga

SEQ ID NO: 58155 - DNA, 20 bp, synthetic construct
  misc_feature 1..20: note = chemically synthesized
  source 1..20: mol_type = other DNA
atcctaactgggctggaagg

SEQ ID NO: 58156 - DNA, 20 bp, synthetic construct
  misc_feature 1..20: note = chemically synthesized
  source 1..20: mol_type = other DNA
tcctaactgggctggaaggc

SEQ ID NO: 58157 - DNA, 20 bp, synthetic construct
  misc_feature 1..20: note = chemically synthesized
  source 1..20: mol_type = other DNA
aactgggctggaaggcaggc

SEQ ID NO: 58158 - DNA, 20 bp, synthetic construct
  misc_feature 1..20: note = chemically synthesized
  source 1..20: mol_type = other DNA
tggaaggcaggccggcgccc

SEQ ID NO: 58159 - DNA, 20 bp, synthetic construct
  misc_feature 1..20: note = chemically synthesized
  source 1..20: mol_type = other DNA
ggaaggcaggccggcgccct

SEQ ID NO: 58160 - DNA, 20 bp, synthetic construct
  misc_feature 1..20: note = chemically synthesized
  source 1..20: mol_type = other DNA
gaaggcaggccggcgcccta

SEQ ID NO: 58161 - DNA, 20 bp, synthetic construct
  misc_feature 1..20: note = chemically synthesized
  source 1..20: mol_type = other DNA
aaggcaggccggcgccctag

SEQ ID NO: 58162 - DNA, 20 bp, synthetic construct
  misc_feature 1..20: note = chemically synthesized
  source 1..20: mol_type = other DNA
ctcccgcctctcaccctgcg

SEQ ID NO: 58163 - DNA, 20 bp, synthetic construct
  misc_feature 1..20: note = chemically synthesized
  source 1..20: mol_type = other DNA
tcccgcctctcaccctgcgt

SEQ ID NO: 58164 - DNA, 20 bp, synthetic construct
  misc_feature 1..20: note = chemically synthesized
  source 1..20: mol_type = other DNA
tctcaccctgcgtgggatgc

SEQ ID NO: 58165 - DNA, 20 bp, synthetic construct
  misc_feature 1..20: note = chemically synthesized
  source 1..20: mol_type = other DNA
tgcgtgggatgccagactcc

SEQ ID NO: 58166 - DNA, 20 bp, synthetic construct
  misc_feature 1..20: note = chemically synthesized
  source 1..20: mol_type = other DNA
tgccagactccaagttctgc

SEQ ID NO: 58167 - DNA, 20 bp, synthetic construct
  misc_feature 1..20: note = chemically synthesized
  source 1..20: mol_type = other DNA
gccagactccaagttctgcc

SEQ ID NO: 58168 - DNA, 20 bp, synthetic construct
  misc_feature 1..20: note = chemically synthesized
  source 1..20: mol_type = other DNA
ttctgccgggcccacctttt

SEQ ID NO: 58169 - DNA, 20 bp, synthetic construct
  misc_feature 1..20: note = chemically synthesized
  source 1..20: mol_type = other DNA
cccaccttttcagtgtttcc

SEQ ID NO: 58170 - DNA, 20 bp, synthetic construct
  misc_feature 1..20: note = chemically synthesized
  source 1..20: mol_type = other DNA
ccaccttttcagtgtttcct

SEQ ID NO: 58171 - DNA, 20 bp, synthetic construct
  misc_feature 1..20: note = chemically synthesized
  source 1..20: mol_type = other DNA
ccaccttgtctcctgctgac

SEQ ID NO: 58172 - DNA, 20 bp, synthetic construct
  misc_feature 1..20: note = chemically synthesized
  source 1..20: mol_type = other DNA
cttgtctcctgctgaccagt

SEQ ID NO: 58173 - DNA, 20 bp, synthetic construct
  misc_feature 1..20: note = chemically synthesized
  source 1..20: mol_type = other DNA
cttctgaatcaatcctactg

SEQ ID NO: 58174 - DNA, 20 bp, synthetic construct
  misc_feature 1..20: note = chemically synthesized
  source 1..20: mol_type = other DNA
gcccaccgaattctttccac

SEQ ID NO: 58175 - DNA, 20 bp, synthetic construct
  misc_feature 1..20: note = chemically synthesized
  source 1..20: mol_type = other DNA
tctttccactggccttaacc

SEQ ID NO: 58176 - DNA, 20 bp, synthetic construct
  misc_feature 1..20: note = chemically synthesized
  source 1..20: mol_type = other DNA
ttccactggccttaacctgg

SEQ ID NO: 58177 - DNA, 20 bp, synthetic construct
  misc_feature 1..20: note = chemically synthesized
  source 1..20: mol_type = other DNA
acctggcagccttctaaact

SEQ ID NO: 58178 - DNA, 20 bp, synthetic construct
  misc_feature 1..20: note = chemically synthesized
  source 1..20: mol_type = other DNA
gcagccttctaaacttagcc

SEQ ID NO: 58179 - DNA, 20 bp, synthetic construct
  misc_feature 1..20: note = chemically synthesized
  source 1..20: mol_type = other DNA
aacttagcctggaccccctc

SEQ ID NO: 58180 - DNA, 20 bp, synthetic construct
  misc_feature 1..20: note = chemically synthesized
  source 1..20: mol_type = other DNA
tgcacactgaccttaccaac

SEQ ID NO: 58181 - DNA, 20 bp, synthetic construct
  misc_feature 1..20: note = chemically synthesized
  source 1..20: mol_type = other DNA
taccaactagctgctccttg

SEQ ID NO: 58182 - DNA, 20 bp, synthetic construct
  misc_feature 1..20: note = chemically synthesized
  source 1..20: mol_type = other DNA
ccaactagctgctccttgaa

SEQ ID NO: 58183 - DNA, 20 bp, synthetic construct
  misc_feature 1..20: note = chemically synthesized
  source 1..20: mol_type = other DNA
gattgcttgcttttgatgtc

SEQ ID NO: 58184 - DNA, 20 bp, synthetic construct
  misc_feature 1..20: note = chemically synthesized
  source 1..20: mol_type = other DNA
gtccagcctacatgcatttc

SEQ ID NO: 58185 - DNA, 20 bp, synthetic construct
  misc_feature 1..20: note = chemically synthesized
  source 1..20: mol_type = other DNA
tccagcctacatgcatttca

SEQ ID NO: 58186 - DNA, 20 bp, synthetic construct
  misc_feature 1..20: note = chemically synthesized
  source 1..20: mol_type = other DNA
ccagcctacatgcatttcaa

SEQ ID NO: 58187 - DNA, 20 bp, synthetic construct
  misc_feature 1..20: note = chemically synthesized
  source 1..20: mol_type = other DNA
ttcaagggatttatactaca

SEQ ID NO: 58188 - DNA, 20 bp, synthetic construct
  misc_feature 1..20: note = chemically synthesized
  source 1..20: mol_type = other DNA
ggatttatactacaaagatt

SEQ ID NO: 58189 - DNA, 20 bp, synthetic construct
  misc_feature 1..20: note = chemically synthesized
  source 1..20: mol_type = other DNA
gatttatactacaaagattc

SEQ ID NO: 58190 - DNA, 20 bp, synthetic construct
  misc_feature 1..20: note = chemically synthesized
  source 1..20: mol_type = other DNA
actacaaagattcaggtttt

SEQ ID NO: 58191 - DNA, 20 bp, synthetic construct
  misc_feature 1..20: note = chemically synthesized
  source 1..20: mol_type = other DNA
attcaggttttaagtttgca

SEQ ID NO: 58192 - DNA, 20 bp, synthetic construct
  misc_feature 1..20: note = chemically synthesized
  source 1..20: mol_type = other DNA
aagtttgcaaagacgtcata

SEQ ID NO: 58193 - DNA, 20 bp, synthetic construct
  misc_feature 1..20: note = chemically synthesized
  source 1..20: mol_type = other DNA
agtttgcaaagacgtcatat

SEQ ID NO: 58194 - DNA, 20 bp, synthetic construct
  misc_feature 1..20: note = chemically synthesized
  source 1..20: mol_type = other DNA
agacgtcatataggtacatt

SEQ ID NO: 58195 - DNA, 20 bp, synthetic construct
  misc_feature 1..20: note = chemically synthesized
  source 1..20: mol_type = other DNA
taggtacattcagaattcta

SEQ ID NO: 58196 - DNA, 20 bp, synthetic construct
  misc_feature 1..20: note = chemically synthesized
  source 1..20: mol_type = other DNA
gtacattcagaattctatgg

SEQ ID NO: 58197 - DNA, 20 bp, synthetic construct
  misc_feature 1..20: note = chemically synthesized
  source 1..20: mol_type = other DNA
tacattcagaattctatggt

SEQ ID NO: 58198 - DNA, 20 bp, synthetic construct
  misc_feature 1..20: note = chemically synthesized
  source 1..20: mol_type = other DNA
cagaattctatggtaggcac

SEQ ID NO: 58199 - DNA, 20 bp, synthetic construct
  misc_feature 1..20: note = chemically synthesized
  source 1..20: mol_type = other DNA
ttctatggtaggcacaagct

SEQ ID NO: 58200 - DNA, 20 bp, synthetic construct
  misc_feature 1..20: note = chemically synthesized
  source 1..20: mol_type = other DNA
taggcacaagctcagctttc

SEQ ID NO: 58201 - DNA, 20 bp, synthetic construct
  misc_feature 1..20: note = chemically synthesized
  source 1..20: mol_type = other DNA
gcacaagctcagctttccag

SEQ ID NO: 58202 - DNA, 20 bp, synthetic construct
  misc_feature 1..20: note = chemically synthesized
  source 1..20: mol_type = other DNA
tccagaagattcaatttgca

SEQ ID NO: 58203 - DNA, 20 bp, synthetic construct
  misc_feature 1..20: note = chemically synthesized
  source 1..20: mol_type = other DNA
tccttttacacaccatgttc

SEQ ID NO: 58204 - DNA, 20 bp, synthetic construct
  misc_feature 1..20: note = chemically synthesized
  source 1..20: mol_type = other DNA
accatgttcaagaaatcaac

SEQ ID NO: 58205 - DNA, 20 bp, synthetic construct
  misc_feature 1..20: note = chemically synthesized
  source 1..20: mol_type = other DNA
gttcaagaaatcaactggac

SEQ ID NO: 58206 - DNA, 20 bp, synthetic construct
  misc_feature 1..20: note = chemically synthesized
  source 1..20: mol_type = other DNA
aaatcaactggacaagcatc

SEQ ID NO: 58207 - DNA, 20 bp, synthetic construct
  misc_feature 1..20: note = chemically synthesized
  source 1..20: mol_type = other DNA
agtaaacacctattgtgtac

SEQ ID NO: 58208 - DNA, 20 bp, synthetic construct
  misc_feature 1..20: note = chemically synthesized
  source 1..20: mol_type = other DNA
gtaaacacctattgtgtacc

SEQ ID NO: 58209 - DNA, 20 bp, synthetic construct
  misc_feature 1..20: note = chemically synthesized
  source 1..20: mol_type = other DNA
aacacctattgtgtaccagg

SEQ ID NO: 58210 - DNA, 20 bp, synthetic construct
  misc_feature 1..20: note = chemically synthesized
  source 1..20: mol_type = other DNA
acacctattgtgtaccaggc

SEQ ID NO: 58211 - DNA, 20 bp, synthetic construct
  misc_feature 1..20: note = chemically synthesized
  source 1..20: mol_type = other DNA
acctattgtgtaccaggcag

SEQ ID NO: 58212 - DNA, 20 bp, synthetic construct
  misc_feature 1..20: note = chemically synthesized
  source 1..20: mol_type = other DNA
cctattgtgtaccaggcagg

SEQ ID NO: 58213 - DNA, 20 bp, synthetic construct
  misc_feature 1..20: note = chemically synthesized
  source 1..20: mol_type = other DNA
gtaccaggcaggaggatgaa

SEQ ID NO: 58214 - DNA, 20 bp, synthetic construct
  misc_feature 1..20: note = chemically synthesized
  source 1..20: mol_type = other DNA
taccaggcaggaggatgaaa

SEQ ID NO: 58215 - DNA, 20 bp, synthetic construct
  misc_feature 1..20: note = chemically synthesized
  source 1..20: mol_type = other DNA
accaggcaggaggatgaaaa

SEQ ID NO: 58216 - DNA, 20 bp, synthetic construct
  misc_feature 1..20: note = chemically synthesized
  source 1..20: mol_type = other DNA
ccaggcaggaggatgaaaag

SEQ ID NO: 58217 - DNA, 20 bp, synthetic construct
  misc_feature 1..20: note = chemically synthesized
  source 1..20: mol_type = other DNA
gcaggaggatgaaaagggga

SEQ ID NO: 58218 - DNA, 20 bp, synthetic construct
  misc_feature 1..20: note = chemically synthesized
  source 1..20: mol_type = other DNA
aggaggatgaaaaggggaaa

SEQ ID NO: 58219 - DNA, 20 bp, synthetic construct
  misc_feature 1..20: note = chemically synthesized
  source 1..20: mol_type = other DNA
gaggatgaaaaggggaaaga

SEQ ID NO: 58220 - DNA, 20 bp, synthetic construct
  misc_feature 1..20: note = chemically synthesized
  source 1..20: mol_type = other DNA
aaaaggggaaagagagctcc

SEQ ID NO: 58221 - DNA, 20 bp, synthetic construct
  misc_feature 1..20: note = chemically synthesized
  source 1..20: mol_type = other DNA
ggaaagagagctcctggcct

SEQ ID NO: 58222 - DNA, 20 bp, synthetic construct
  misc_feature 1..20: note = chemically synthesized
  source 1..20: mol_type = other DNA
ctggcctcagattgtacatg

SEQ ID NO: 58223 - DNA, 20 bp, synthetic construct
  misc_feature 1..20: note = chemically synthesized
  source 1..20: mol_type = other DNA
ttgtacatgtggcatgacat

SEQ ID NO: 58224 - DNA, 20 bp, synthetic construct
  misc_feature 1..20: note = chemically synthesized
  source 1..20: mol_type = other DNA
tgtacatgtggcatgacatg

SEQ ID NO: 58225 - DNA, 20 bp, synthetic construct
  misc_feature 1..20: note = chemically synthesized
  source 1..20: mol_type = other DNA
gacatgaggcttgctctttc

SEQ ID NO: 58226 - DNA, 20 bp, synthetic construct
  misc_feature 1..20: note = chemically synthesized
  source 1..20: mol_type = other DNA
atgaggcttgctctttctgg

SEQ ID NO: 58227 - DNA, 20 bp, synthetic construct
  misc_feature 1..20: note = chemically synthesized
  source 1..20: mol_type = other DNA
tgaggcttgctctttctgga

SEQ ID NO: 58228 - DNA, 20 bp, synthetic construct
  misc_feature 1..20: note = chemically synthesized
  source 1..20: mol_type = other DNA
gaggcttgctctttctggaa

SEQ ID NO: 58229 - DNA, 20 bp, synthetic construct
  misc_feature 1..20: note = chemically synthesized
  source 1..20: mol_type = other DNA
tctggaagggctgtcgatac

SEQ ID NO: 58230 - DNA, 20 bp, synthetic construct
  misc_feature 1..20: note = chemically synthesized
  source 1..20: mol_type = other DNA
ctggaagggctgtcgatact

SEQ ID NO: 58231 - DNA, 20 bp, synthetic construct
  misc_feature 1..20: note = chemically synthesized
  source 1..20: mol_type = other DNA
gaagggctgtcgatactggg

SEQ ID NO: 58232 - DNA, 20 bp, synthetic construct
  misc_feature 1..20: note = chemically synthesized
  source 1..20: mol_type = other DNA
gtcgatactgggaagaaaca

SEQ ID NO: 58233 - DNA, 20 bp, synthetic construct
  misc_feature 1..20: note = chemically synthesized
  source 1..20: mol_type = other DNA
tcgatactgggaagaaacaa

SEQ ID NO: 58234 - DNA, 20 bp, synthetic construct
  misc_feature 1..20: note = chemically synthesized
  source 1..20: mol_type = other DNA
gaatttatgatcctcccttg

SEQ ID NO: 58235 - DNA, 20 bp, synthetic construct
  misc_feature 1..20: note = chemically synthesized
  source 1..20: mol_type = other DNA
gatcctcccttgcagatgca

SEQ ID NO: 58236 - DNA, 20 bp, synthetic construct
  misc_feature 1..20: note = chemically synthesized
  source 1..20: mol_type = other DNA
cctcccttgcagatgcacag

SEQ ID NO: 58237 - DNA, 20 bp, synthetic construct
  misc_feature 1..20: note = chemically synthesized
  source 1..20: mol_type = other DNA
gcagatgcacagcagattcc

SEQ ID NO: 58238 - DNA, 20 bp, synthetic construct
  misc_feature 1..20: note = chemically synthesized
  source 1..20: mol_type = other DNA
acagcagattccgagtgaaa

SEQ ID NO: 58239 - DNA, 20 bp, synthetic construct
  misc_feature 1..20: note = chemically synthesized
  source 1..20: mol_type = other DNA
gaaatggcctgctctgaatc

SEQ ID NO: 58240 - DNA, 20 bp, synthetic construct
  misc_feature 1..20: note = chemically synthesized
  source 1..20: mol_type = other DNA
aaatggcctgctctgaatct

SEQ ID NO: 58241 - DNA, 20 bp, synthetic construct
  misc_feature 1..20: note = chemically synthesized
  source 1..20: mol_type = other DNA
cctgctctgaatctaggtgc

SEQ ID NO: 58242 - DNA, 20 bp, synthetic construct
  misc_feature 1..20: note = chemically synthesized
  source 1..20: mol_type = other DNA
tgctctgaatctaggtgctg

SEQ ID NO: 58243 - DNA, 20 bp, synthetic construct
  misc_feature 1..20: note = chemically synthesized
  source 1..20: mol_type = other DNA
aatctaggtgctggagtcca

SEQ ID NO: 58244 - DNA, 20 bp, synthetic construct
  misc_feature 1..20: note = chemically synthesized
  source 1..20: mol_type = other DNA
ctctttccactttgtttgca

SEQ ID NO: 58245 - DNA, 20 bp, synthetic construct
  misc_feature 1..20: note = chemically synthesized
  source 1..20: mol_type = other DNA
tgtttgcaaagacctcactc

SEQ ID NO: 58246 - DNA, 20 bp, synthetic construct
  misc_feature 1..20: note = chemically synthesized
  source 1..20: mol_type = other DNA
tttgcaaagacctcactcca

SEQ ID NO: 58247 - DNA, 20 bp, synthetic construct
  misc_feature 1..20: note = chemically synthesized
  source 1..20: mol_type = other DNA
tgcaaagacctcactccaga

SEQ ID NO: 58248 - DNA, 20 bp, synthetic construct
  misc_feature 1..20: note = chemically synthesized
  source 1..20: mol_type = other DNA
aagacctcactccagagagc

SEQ ID NO: 58249 - DNA, 20 bp, synthetic construct
  misc_feature 1..20: note = chemically synthesized
  source 1..20: mol_type = other DNA
ctccagagagccagtgcaca

SEQ ID NO: 58250 - DNA, 20 bp, synthetic construct
  misc_feature 1..20: note = chemically synthesized
  source 1..20: mol_type = other DNA
agagagccagtgcacaaaga

SEQ ID NO: 58251 - DNA, 20 bp, synthetic construct
  misc_feature 1..20: note = chemically synthesized
  source 1..20: mol_type = other DNA
gtgcacaaagacagtgcaac

SEQ ID NO: 58252 - DNA, 20 bp, synthetic construct
  misc_feature 1..20: note = chemically synthesized
  source 1..20: mol_type = other DNA
cacaaagacagtgcaaccag

SEQ ID NO: 58253 - DNA, 20 bp, synthetic construct
  misc_feature 1..20: note = chemically synthesized
  source 1..20: mol_type = other DNA
acaaagacagtgcaaccagt

SEQ ID NO: 58254 - DNA, 20 bp, synthetic construct
  misc_feature 1..20: note = chemically synthesized
  source 1..20: mol_type = other DNA
cagtgcaaccagtgggttga

SEQ ID NO: 58255 - DNA, 20 bp, synthetic construct
  misc_feature 1..20: note = chemically synthesized
  source 1..20: mol_type = other DNA
tgggttgacagtgactccat

SEQ ID NO: 58256 - DNA, 20 bp, synthetic construct
  misc_feature 1..20: note = chemically synthesized
  source 1..20: mol_type = other DNA
gggttgacagtgactccatg

SEQ ID NO: 58257 - DNA, 20 bp, synthetic construct
  misc_feature 1..20: note = chemically synthesized
  source 1..20: mol_type = other DNA
tgacagtgactccatgaggt

SEQ ID NO: 58258 - DNA, 20 bp, synthetic construct
  misc_feature 1..20: note = chemically synthesized
  source 1..20: mol_type = other DNA
gacagtgactccatgaggta

SEQ ID NO: 58259 - DNA, 20 bp, synthetic construct
  misc_feature 1..20: note = chemically synthesized
  source 1..20: mol_type = other DNA
gtgactccatgaggtaaggt

SEQ ID NO: 58260 - DNA, 20 bp, synthetic construct
  misc_feature 1..20: note = chemically synthesized
  source 1..20: mol_type = other DNA
gactccatgaggtaaggtca

SEQ ID NO: 58261 - DNA, 20 bp, synthetic construct
  misc_feature 1..20: note = chemically synthesized
  source 1..20: mol_type = other DNA
aggtcagagttatccccatc

SEQ ID NO: 58262 - DNA, 20 bp, synthetic construct
  misc_feature 1..20: note = chemically synthesized
  source 1..20: mol_type = other DNA
ccccatcgagcccgccatcg

SEQ ID NO: 58263 - DNA, 20 bp, synthetic construct
  misc_feature 1..20: note = chemically synthesized
  source 1..20: mol_type = other DNA
tcgagcccgccatcgcagca

SEQ ID NO: 58264 - DNA, 20 bp, synthetic construct
  misc_feature 1..20: note = chemically synthesized
  source 1..20: mol_type = other DNA
gagcccgccatcgcagcaca

SEQ ID NO: 58265 - DNA, 20 bp, synthetic construct
  misc_feature 1..20: note = chemically synthesized
  source 1..20: mol_type = other DNA
cccgccatcgcagcacagag

SEQ ID NO: 58266 - DNA, 20 bp, synthetic construct
  misc_feature 1..20: note = chemically synthesized
  source 1..20: mol_type = other DNA
ccgccatcgcagcacagagt

SEQ ID NO: 58267 - DNA, 20 bp, synthetic construct
  misc_feature 1..20: note = chemically synthesized
  source 1..20: mol_type = other DNA
gccatcgcagcacagagtag

SEQ ID NO: 58268 - DNA, 20 bp, synthetic construct
  misc_feature 1..20: note = chemically synthesized
  source 1..20: mol_type = other DNA
cagcacagagtaggagctca

SEQ ID NO: 58269 - DNA, 20 bp, synthetic construct
  misc_feature 1..20: note = chemically synthesized
  source 1..20: mol_type = other DNA
aggagctcatggtttgctga

SEQ ID NO: 58270 - DNA, 20 bp, synthetic construct
  misc_feature 1..20: note = chemically synthesized
  source 1..20: mol_type = other DNA
gagctcatggtttgctgaca

SEQ ID NO: 58271 - DNA, 20 bp, synthetic construct
  misc_feature 1..20: note = chemically synthesized
  source 1..20: mol_type = other DNA
agctcatggtttgctgacag

SEQ ID NO: 58272 - DNA, 20 bp, synthetic construct
  misc_feature 1..20: note = chemically synthesized
  source 1..20: mol_type = other DNA
tcatggtttgctgacagagg

SEQ ID NO: 58273 - DNA, 20 bp, synthetic construct
  misc_feature 1..20: note = chemically synthesized
  source 1..20: mol_type = other DNA
tggtttgctgacagaggtgg

SEQ ID NO: 58274 - DNA, 20 bp, synthetic construct
  misc_feature 1..20: note = chemically synthesized
  source 1..20: mol_type = other DNA
gtttgctgacagaggtggca

SEQ ID NO: 58275 - DNA, 20 bp, synthetic construct
  misc_feature 1..20: note = chemically synthesized
  source 1..20: mol_type = other DNA
tttgctgacagaggtggcag

SEQ ID NO: 58276 - DNA, 20 bp, synthetic construct
  misc_feature 1..20: note = chemically synthesized
  source 1..20: mol_type = other DNA
gctgacagaggtggcagagg

SEQ ID NO: 58277 - DNA, 20 bp, synthetic construct
  misc_feature 1..20: note = chemically synthesized
  source 1..20: mol_type = other DNA
tccttcctgttgcctgtaat

SEQ ID NO: 58278 - DNA, 20 bp, synthetic construct
  misc_feature 1..20: note = chemically synthesized
  source 1..20: mol_type = other DNA
ttgtatttgcaatgtgcttt

SEQ ID NO: 58279 - DNA, 20 bp, synthetic construct
  misc_feature 1..20: note = chemically synthesized
  source 1..20: mol_type = other DNA
tatttgcaatgtgcttttgg

SEQ ID NO: 58280 - DNA, 20 bp, synthetic construct
  misc_feature 1..20: note = chemically synthesized
  source 1..20: mol_type = other DNA
ttttggcagcttcctcatca

SEQ ID NO: 58281 - DNA, 20 bp, synthetic construct
  misc_feature 1..20: note = chemically synthesized
  source 1..20: mol_type = other DNA
tttggcagcttcctcatcaa

SEQ ID NO: 58282 - DNA, 20 bp, synthetic construct
  misc_feature 1..20: note = chemically synthesized
  source 1..20: mol_type = other DNA
tcctcatcaaaggcctcccc

SEQ ID NO: 58283 - DNA, 20 bp, synthetic construct
  misc_feature 1..20: note = chemically synthesized
  source 1..20: mol_type = other DNA
ctcatcaaaggcctcccctg

SEQ ID NO: 58284 - DNA, 20 bp, synthetic construct
  misc_feature 1..20: note = chemically synthesized
  source 1..20: mol_type = other DNA
tcaaaggcctcccctggagc

SEQ ID NO: 58285 - DNA, 20 bp, synthetic construct
  misc_feature 1..20: note = chemically synthesized
  source 1..20: mol_type = other DNA
ggcctcccctggagcaagaa

SEQ ID NO: 58286 - DNA, 20 bp, synthetic construct
  misc_feature 1..20: note = chemically synthesized
  source 1..20: mol_type = other DNA
tcccctggagcaagaataga

SEQ ID NO: 58287 - DNA, 20 bp, synthetic construct
  misc_feature 1..20: note = chemically synthesized
  source 1..20: mol_type = other DNA
cccctggagcaagaatagat

SEQ ID NO: 58288 - DNA, 20 bp, synthetic construct
  misc_feature 1..20: note = chemically synthesized
  source 1..20: mol_type = other DNA
cctggagcaagaatagatgg

SEQ ID NO: 58289 - DNA, 20 bp, synthetic construct
  misc_feature 1..20: note = chemically synthesized
  source 1..20: mol_type = other DNA
ctttccctgctgctcccctt

SEQ ID NO: 58290 - DNA, 20 bp, synthetic construct
  misc_feature 1..20: note = chemically synthesized
  source 1..20: mol_type = other DNA
tttccctgctgctccccttt

SEQ ID NO: 58291 - DNA, 20 bp, synthetic construct
  misc_feature 1..20: note = chemically synthesized
  source 1..20: mol_type = other DNA
gctgctcccctttgggacct

SEQ ID NO: 58292 - DNA, 20 bp, synthetic construct
  misc_feature 1..20: note = chemically synthesized
  source 1..20: mol_type = other DNA
gaccttggcctctcacctac

SEQ ID NO: 58293 - DNA, 20 bp, synthetic construct
  misc_feature 1..20: note = chemically synthesized
  source 1..20: mol_type = other DNA
accttggcctctcacctacc

SEQ ID NO: 58294 - DNA, 20 bp, synthetic construct
  misc_feature 1..20: note = chemically synthesized
  source 1..20: mol_type = other DNA
ccttggcctctcacctaccg

SEQ ID NO: 58295 - DNA, 20 bp, synthetic construct
  misc_feature 1..20: note = chemically synthesized
  source 1..20: mol_type = other DNA
gctgcgatggcgggctcgat

SEQ ID NO: 58296 - DNA, 20 bp, synthetic construct
  misc_feature 1..20: note = chemically synthesized
  source 1..20: mol_type = other DNA
ataactctgaccttacctca

SEQ ID NO: 58297 - DNA, 20 bp, synthetic construct
  misc_feature 1..20: note = chemically synthesized
  source 1..20: mol_type = other DNA
gtctttgtgcactggctctc

SEQ ID NO: 58298 - DNA, 20 bp, synthetic construct
  misc_feature 1..20: note = chemically synthesized
  source 1..20: mol_type = other DNA
tcagagcaggccatttcact

SEQ ID NO: 58299 - DNA, 20 bp, synthetic construct
  misc_feature 1..20: note = chemically synthesized
  source 1..20: mol_type = other DNA
tctgctgtgcatctgcaagg

SEQ ID NO: 58300 - DNA, 20 bp, synthetic construct
  misc_feature 1..20: note = chemically synthesized
  source 1..20: mol_type = other DNA
tggtacacaataggtgttta

SEQ ID NO: 58301 - DNA, 20 bp, synthetic construct
  misc_feature 1..20: note = chemically synthesized
  source 1..20: mol_type = other DNA
tcttgaacatggtgtgtaaa

SEQ ID NO: 58302 - DNA, 20 bp, synthetic construct
  misc_feature 1..20: note = chemically synthesized
  source 1..20: mol_type = other DNA
gtaaaaggaatctttgcaaa

SEQ ID NO: 58303 - DNA, 20 bp, synthetic construct
  misc_feature 1..20: note = chemically synthesized
  source 1..20: mol_type = other DNA
agctgagcttgtgcctacca

SEQ ID NO: 58304 - DNA, 20 bp, synthetic construct
  misc_feature 1..20: note = chemically synthesized
  source 1..20: mol_type = other DNA
cttgtgcctaccatagaatt

SEQ ID NO: 58305 - DNA, 20 bp, synthetic construct
  misc_feature 1..20: note = chemically synthesized
  source 1..20: mol_type = other DNA
cgtctttgcaaacttaaaac

SEQ ID NO: 58306 - DNA, 20 bp, synthetic construct
  misc_feature 1..20: note = chemically synthesized
  source 1..20: mol_type = other DNA
tagttggtaaggtcagtgtg

SEQ ID NO: 58307 - DNA, 20 bp, synthetic construct
  misc_feature 1..20: note = chemically synthesized
  source 1..20: mol_type = other DNA
cataaagggcagaggccgga

SEQ ID NO: 58308 - DNA, 20 bp, synthetic construct
  misc_feature 1..20: note = chemically synthesized
  source 1..20: mol_type = other DNA
gccaggttaaggccagtgga

SEQ ID NO: 58309 - DNA, 20 bp, synthetic construct
  misc_feature 1..20: note = chemically synthesized
  source 1..20: mol_type = other DNA
aaagaattcggtgggcagcg

SEQ ID NO: 58310 - DNA, 20 bp, synthetic construct
  misc_feature 1..20: note = chemically synthesized
  source 1..20: mol_type = other DNA
gggcagcgaggagtccacag

SEQ ID NO: 58311 - DNA, 20 bp, synthetic construct
  misc_feature 1..20: note = chemically synthesized
  source 1..20: mol_type = other DNA
aaggtgggcccggcagaact

SEQ ID NO: 58312 - DNA, 20 bp, synthetic construct
  misc_feature 1..20: note = chemically synthesized
  source 1..20: mol_type = other DNA
ttggagtctggcatcccacg

SEQ ID NO: 58313 - DNA, 20 bp, synthetic construct
  misc_feature 1..20: note = chemically synthesized
  source 1..20: mol_type = other DNA
ggcctgccttccagcccagt

SEQ ID NO: 58314 - DNA, 20 bp, synthetic construct
  misc_feature 1..20: note = chemically synthesized
  source 1..20: mol_type = other DNA
ttccagcccagttaggattt

SEQ ID NO: 58315 - DNA, 20 bp, synthetic construct
  misc_feature 1..20: note = chemically synthesized
  source 1..20: mol_type = other DNA
gaaacctgatcctccagtcc

SEQ ID NO: 58316 - DNA, 20 bp, synthetic construct
  misc_feature 1..20: note = chemically synthesized
  source 1..20: mol_type = other DNA
tccgttaatgtttaatcaga

SEQ ID NO: 58317 - DNA, 20 bp, synthetic construct
  misc_feature 1..20: note = chemically synthesized
  source 1..20: mol_type = other DNA
gcgggcgccgccgttcagtt

SEQ ID NO: 58318 - DNA, 20 bp, synthetic construct
  misc_feature 1..20: note = chemically synthesized
  source 1..20: mol_type = other DNA
agttcagggtctgagcctgg

SEQ ID NO: 58319 - DNA, 20 bp, synthetic construct
  misc_feature 1..20: note = chemically synthesized
  source 1..20: mol_type = other DNA
agcggctcccagctcccagc

SEQ ID NO: 58320 - DNA, 20 bp, synthetic construct
  misc_feature 1..20: note = chemically synthesized
  source 1..20: mol_type = other DNA
tgctgctgctgctgctgctc

SEQ ID NO: 58321 - DNA, 20 bp, synthetic construct
  misc_feature 1..20: note = chemically synthesized
  source 1..20: mol_type = other DNA
ttccaccgctgcgccaaggt

SEQ ID NO: 58322 - DNA, 20 bp, synthetic construct
  misc_feature 1..20: note = chemically synthesized
  source 1..20: mol_type = other DNA
ctgcgccaaggtgcgggtgt

SEQ ID NO: 58323 - DNA, 20 bp, synthetic construct
  misc_feature 1..20: note = chemically synthesized
  source 1..20: mol_type = other DNA
cccccatgtaagagaggaag

SEQ ID NO: 58324 - DNA, 20 bp, synthetic construct
  misc_feature 1..20: note = chemically synthesized
  source 1..20: mol_type = other DNA
aggcaaggcggcgggggagg

SEQ ID NO: 58325 - DNA, 20 bp, synthetic construct
  misc_feature 1..20: note = chemically synthesized
  source 1..20: mol_type = other DNA
ctattcagtgggaaggttcg

SEQ ID NO: 58326 - DNA, 20 bp, synthetic construct
  misc_feature 1..20: note = chemically synthesized
  source 1..20: mol_type = other DNA
aagggcgagcagagcactgc

SEQ ID NO: 58327 - DNA, 20 bp, synthetic construct
  misc_feature 1..20: note = chemically synthesized
  source 1..20: mol_type = other DNA
tctgcctcgccgcggcacag

SEQ ID NO: 58328 - DNA, 20 bp, synthetic construct
  misc_feature 1..20: note = chemically synthesized
  source 1..20: mol_type = other DNA
gccgcggcacaggtgggtga

SEQ ID NO: 58329 - DNA, 20 bp, synthetic construct
  misc_feature 1..20: note = chemically synthesized
  source 1..20: mol_type = other DNA
cggcacaggtgggtgaagga

SEQ ID NO: 58330 - DNA, 20 bp, synthetic construct
  misc_feature 1..20: note = chemically synthesized
  source 1..20: mol_type = other DNA
aaagcgggcttgccattata

SEQ ID NO: 58331 - DNA, 20 bp, synthetic construct
  misc_feature 1..20: note = chemically synthesized
  source 1..20: mol_type = other DNA
tttggaaaacatgggcagcg

SEQ ID NO: 58332 - DNA, 20 bp, synthetic construct
  misc_feature 1..20: note = chemically synthesized
  source 1..20: mol_type = other DNA
ggccctacccgagacagggg

SEQ ID NO: 58333 - DNA, 20 bp, synthetic construct
  misc_feature 1..20: note = chemically synthesized
  source 1..20: mol_type = other DNA
gtctgccgaccgtgtgcggg

SEQ ID NO: 58334 - DNA, 20 bp, synthetic construct
  misc_feature 1..20: note = chemically synthesized
  source 1..20: mol_type = other DNA
aggttctgtgtcccccagct

SEQ ID NO: 58335 - DNA, 20 bp, synthetic construct
  misc_feature 1..20: note = chemically synthesized
  source 1..20: mol_type = other DNA
ccccagcttggagtcagatg

SEQ ID NO: 58336 - DNA, 20 bp, synthetic construct
  misc_feature 1..20: note = chemically synthesized
  source 1..20: mol_type = other DNA
gcttggagtcagatgtgggg

SEQ ID NO: 58337 - DNA, 20 bp, synthetic construct
  misc_feature 1..20: note = chemically synthesized
  source 1..20: mol_type = other DNA
aagggaaagttctgttgacc

SEQ ID NO: 58338 - DNA, 20 bp, synthetic construct
  misc_feature 1..20: note = chemically synthesized
  source 1..20: mol_type = other DNA
acttacaatgcaagccccgg

SEQ ID NO: 58339 - DNA, 20 bp, synthetic construct
  misc_feature 1..20: note = chemically synthesized
  source 1..20: mol_type = other DNA
ctgcctgcccacgcttctgt

SEQ ID NO: 58340 - DNA, 20 bp, synthetic construct
  misc_feature 1..20: note = chemically synthesized
  source 1..20: mol_type = other DNA
cacgcttctgtctgagtgtg

SEQ ID NO: 58341 - DNA, 20 bp, synthetic construct
  misc_feature 1..20: note = chemically synthesized
  source 1..20: mol_type = other DNA
tgtctgagtgtgctgggtgg

SEQ ID NO: 58342 - DNA, 20 bp, synthetic construct
  misc_feature 1..20: note = chemically synthesized
  source 1..20: mol_type = other DNA
ctgagcctttgactttctcg

SEQ ID NO: 58343 - DNA, 20 bp, synthetic construct
  misc_feature 1..20: note = chemically synthesized
  source 1..20: mol_type = other DNA
gactttctcgagggatgttg

SEQ ID NO: 58344 - DNA, 20 bp, synthetic construct
  misc_feature 1..20: note = chemically synthesized
  source 1..20: mol_type = other DNA
ggatgttgtggggttgtggc

SEQ ID NO: 58345 - DNA, 20 bp, synthetic construct
  misc_feature 1..20: note = chemically synthesized
  source 1..20: mol_type = other DNA
aaacaactgttctggaaata

SEQ ID NO: 58346 - DNA, 20 bp, synthetic construct
  misc_feature 1..20: note = chemically synthesized
  source 1..20: mol_type = other DNA
tgagtaccccatcctgagag

SEQ ID NO: 58347 - DNA, 20 bp, synthetic construct
  misc_feature 1..20: note = chemically synthesized
  source 1..20: mol_type = other DNA
accacctgaaccaagccctt

SEQ ID NO: 58348 - DNA, 20 bp, synthetic construct
  misc_feature 1..20: note = chemically synthesized
  source 1..20: mol_type = other DNA
tcattcaatggttattttgt

SEQ ID NO: 58349 - DNA, 20 bp, synthetic construct
  misc_feature 1..20: note = chemically synthesized
  source 1..20: mol_type = other DNA
caatggttattttgtgggaa

SEQ ID NO: 58350 - DNA, 20 bp, synthetic construct
  misc_feature 1..20: note = chemically synthesized
  source 1..20: mol_type = other DNA
tattttgtgggaatcgaatt

SEQ ID NO: 58351 - DNA, 20 bp, synthetic construct
  misc_feature 1..20: note = chemically synthesized
  source 1..20: mol_type = other DNA
tcaccccaggtgcattagaa

SEQ ID NO: 58352 - DNA, 20 bp, synthetic construct
  misc_feature 1..20: note = chemically synthesized
  source 1..20: mol_type = other DNA
agaactgacactccactgca

SEQ ID NO: 58353 - DNA, 20 bp, synthetic construct
  misc_feature 1..20: note = chemically synthesized
  source 1..20: mol_type = other DNA
ttagcggaaggcattttcag

SEQ ID NO: 58354 - DNA, 20 bp, synthetic construct
  misc_feature 1..20: note = chemically synthesized
  source 1..20: mol_type = other DNA
tgggtctttgaagcattagt

SEQ ID NO: 58355 - DNA, 20 bp, synthetic construct
  misc_feature 1..20: note = chemically synthesized
  source 1..20: mol_type = other DNA
ttcagcgatgatggtgtcat

SEQ ID NO: 58356 - DNA, 20 bp, synthetic construct
  misc_feature 1..20: note = chemically synthesized
  source 1..20: mol_type = other DNA
gtgtcatgagaattttattc

SEQ ID NO: 58357 - DNA, 20 bp, synthetic construct
  misc_feature 1..20: note = chemically synthesized
  source 1..20: mol_type = other DNA
tttttcttttttttttgaga

SEQ ID NO: 58358 - DNA, 20 bp, synthetic construct
  misc_feature 1..20: note = chemically synthesized
  source 1..20: mol_type = other DNA
ttcgctcttgttgcccaggc

SEQ ID NO: 58359 - DNA, 20 bp, synthetic construct
  misc_feature 1..20: note = chemically synthesized
  source 1..20: mol_type = other DNA
ctcactgcaacatctgtctc

SEQ ID NO: 58360 - DNA, 20 bp, synthetic construct
  misc_feature 1..20: note = chemically synthesized
  source 1..20: mol_type = other DNA
gcctcagcctcccaagaagc

SEQ ID NO: 58361 - DNA, 20 bp, synthetic construct
  misc_feature 1..20: note = chemically synthesized
  source 1..20: mol_type = other DNA
ttttgtatttttagtagaga

SEQ ID NO: 58362 - DNA, 20 bp, synthetic construct
  misc_feature 1..20: note = chemically synthesized
  source 1..20: mol_type = other DNA
gcaaactcctgacctcctca

SEQ ID NO: 58363 - DNA, 20 bp, synthetic construct
  misc_feature 1..20: note = chemically synthesized
  source 1..20: mol_type = other DNA
gcctcagcctcccaaagtgc

SEQ ID NO: 58364 - DNA, 20 bp, synthetic construct
  misc_feature 1..20: note = chemically synthesized
  source 1..20: mol_type = other DNA
attatttttaatttagttgt

SEQ ID NO: 58365 - DNA, 20 bp, synthetic construct
  misc_feature 1..20: note = chemically synthesized
  source 1..20: mol_type = other DNA
accgttttggccctaaggct

SEQ ID NO: 58366 - DNA, 20 bp, synthetic construct
  misc_feature 1..20: note = chemically synthesized
  source 1..20: mol_type = other DNA
gccctaaggctttgggtaaa

SEQ ID NO: 58367 - DNA, 20 bp, synthetic construct
  misc_feature 1..20: note = chemically synthesized
  source 1..20: mol_type = other DNA
ggactctgttctactctgac

SEQ ID NO: 58368 - DNA, 20 bp, synthetic construct
  misc_feature 1..20: note = chemically synthesized
  source 1..20: mol_type = other DNA
agatgcatatatacagagat

SEQ ID NO: 58369 - DNA, 20 bp, synthetic construct
  misc_feature 1..20: note = chemically synthesized
  source 1..20: mol_type = other DNA
gtaggggccaaggaggagca

SEQ ID NO: 58370 - DNA, 20 bp, synthetic construct
  misc_feature 1..20: note = chemically synthesized
  source 1..20: mol_type = other DNA
tggggcctaatgggaggtgt

SEQ ID NO: 58371 - DNA, 20 bp, synthetic construct
  misc_feature 1..20: note = chemically synthesized
  source 1..20: mol_type = other DNA
ttggtgccgtccttgtgata

SEQ ID NO: 58372 - DNA, 20 bp, synthetic construct
  misc_feature 1..20: note = chemically synthesized
  source 1..20: mol_type = other DNA
catgcttcctggagagcttg

SEQ ID NO: 58373 - DNA, 20 bp, synthetic construct
  misc_feature 1..20: note = chemically synthesized
  source 1..20: mol_type = other DNA
agagcttgcagaatcatgag

SEQ ID NO: 58374 - DNA, 20 bp, synthetic construct
  misc_feature 1..20: note = chemically synthesized
  source 1..20: mol_type = other DNA
tgcctgcatttgtagagcat

SEQ ID NO: 58375 - DNA, 20 bp, synthetic construct
  misc_feature 1..20: note = chemically synthesized
  source 1..20: mol_type = other DNA
gtatctgaggctccgagagg

SEQ ID NO: 58376 - DNA, 20 bp, synthetic construct
  misc_feature 1..20: note = chemically synthesized
  source 1..20: mol_type = other DNA
caaccagtaaatattggagc

SEQ ID NO: 58377 - DNA, 20 bp, synthetic construct
  misc_feature 1..20: note = chemically synthesized
  source 1..20: mol_type = other DNA
tctgactggggcatggggga

SEQ ID NO: 58378 - DNA, 20 bp, synthetic construct
  misc_feature 1..20: note = chemically synthesized
  source 1..20: mol_type = other DNA
gcgaccaggcccgtagagag

SEQ ID NO: 58379 - DNA, 20 bp, synthetic construct
  misc_feature 1..20: note = chemically synthesized
  source 1..20: mol_type = other DNA
gtacagaggaaaacctgttg

SEQ ID NO: 58380 - DNA, 20 bp, synthetic construct
  misc_feature 1..20: note = chemically synthesized
  source 1..20: mol_type = other DNA
cccgtagttcccatttttgc

SEQ ID NO: 58381 - DNA, 20 bp, synthetic construct
  misc_feature 1..20: note = chemically synthesized
  source 1..20: mol_type = other DNA
tgaaagtgttatataaccat

SEQ ID NO: 58382 - DNA, 20 bp, synthetic construct
  misc_feature 1..20: note = chemically synthesized
  source 1..20: mol_type = other DNA
aataataatagttggcctat

SEQ ID NO: 58383 - DNA, 20 bp, synthetic construct
  misc_feature 1..20: note = chemically synthesized
  source 1..20: mol_type = other DNA
ttttgttgtaatttgtaagt

SEQ ID NO: 58384 - DNA, 20 bp, synthetic construct
  misc_feature 1..20: note = chemically synthesized
  source 1..20: mol_type = other DNA
ggggtgagataaagtacacc

SEQ ID NO: 58385 - DNA, 20 bp, synthetic construct
  misc_feature 1..20: note = chemically synthesized
  source 1..20: mol_type = other DNA
taaagtacacctagggtttg

SEQ ID NO: 58386 - DNA, 20 bp, synthetic construct
  misc_feature 1..20: note = chemically synthesized
  source 1..20: mol_type = other DNA
tgttcctccttgcatggggc

SEQ ID NO: 58387 - DNA, 20 bp, synthetic construct
  misc_feature 1..20: note = chemically synthesized
  source 1..20: mol_type = other DNA
gcaggcccaggctgcccgcc

SEQ ID NO: 58388 - DNA, 20 bp, synthetic construct
  misc_feature 1..20: note = chemically synthesized
  source 1..20: mol_type = other DNA
ttcctggcttcctggtgaag

SEQ ID NO: 58389 - DNA, 20 bp, synthetic construct
  misc_feature 1..20: note = chemically synthesized
  source 1..20: mol_type = other DNA
gctggtgagccacccttttt

SEQ ID NO: 58390 - DNA, 20 bp, synthetic construct
  misc_feature 1..20: note = chemically synthesized
  source 1..20: mol_type = other DNA
aagtatgtattgagcactta

SEQ ID NO: 58391 - DNA, 20 bp, synthetic construct
  misc_feature 1..20: note = chemically synthesized
  source 1..20: mol_type = other DNA
gtaactactggctttctgta

SEQ ID NO: 58392 - DNA, 20 bp, synthetic construct
  misc_feature 1..20: note = chemically synthesized
  source 1..20: mol_type = other DNA
aggggaccacacagacagct

SEQ ID NO: 58393 - DNA, 20 bp, synthetic construct
  misc_feature 1..20: note = chemically synthesized
  source 1..20: mol_type = other DNA
cagacagctaggggtagagc

SEQ ID NO: 58394 - DNA, 20 bp, synthetic construct
  misc_feature 1..20: note = chemically synthesized
  source 1..20: mol_type = other DNA
aacctgtagggacaaggccc

SEQ ID NO: 58395 - DNA, 20 bp, synthetic construct
  misc_feature 1..20: note = chemically synthesized
  source 1..20: mol_type = other DNA
cctgggatgttcagtggagc

SEQ ID NO: 58396 - DNA, 20 bp, synthetic construct
  misc_feature 1..20: note = chemically synthesized
  source 1..20: mol_type = other DNA
tttataaaaaagcatgactc

SEQ ID NO: 58397 - DNA, 20 bp, synthetic construct
  misc_feature 1..20: note = chemically synthesized
  source 1..20: mol_type = other DNA
cctttgaagctgttgctatc

SEQ ID NO: 58398 - DNA, 20 bp, synthetic construct
  misc_feature 1..20: note = chemically synthesized
  source 1..20: mol_type = other DNA
gtgaagtcccttctttagga

SEQ ID NO: 58399 - DNA, 20 bp, synthetic construct
  misc_feature 1..20: note = chemically synthesized
  source 1..20: mol_type = other DNA
cagggtggccctcctccctc

SEQ ID NO: 58400 - DNA, 20 bp, synthetic construct
  misc_feature 1..20: note = chemically synthesized
  source 1..20: mol_type = other DNA
gtggaggggcagaaagggga

SEQ ID NO: 58401 - DNA, 20 bp, synthetic construct
  misc_feature 1..20: note = chemically synthesized
  source 1..20: mol_type = other DNA
aagatttgaagcactagggc

SEQ ID NO: 58402 - DNA, 20 bp, synthetic construct
  misc_feature 1..20: note = chemically synthesized
  source 1..20: mol_type = other DNA
agcactagggccagggtgag

SEQ ID NO: 58403 - DNA, 20 bp, synthetic construct
  misc_feature 1..20: note = chemically synthesized
  source 1..20: mol_type = other DNA
cctaaagaagggacttcact

SEQ ID NO: 58404 - DNA, 20 bp, synthetic construct
  misc_feature 1..20: note = chemically synthesized
  source 1..20: mol_type = other DNA
ctggatagcaacagcttcaa

SEQ ID NO: 58405 - DNA, 20 bp, synthetic construct
  misc_feature 1..20: note = chemically synthesized
  source 1..20: mol_type = other DNA
ttcaaaggaattttggaccc

SEQ ID NO: 58406 - DNA, 20 bp, synthetic construct
  misc_feature 1..20: note = chemically synthesized
  source 1..20: mol_type = other DNA
ggcagcagatgcattggcac

SEQ ID NO: 58407 - DNA, 20 bp, synthetic construct
  misc_feature 1..20: note = chemically synthesized
  source 1..20: mol_type = other DNA
aatggctggcaggcagacca

SEQ ID NO: 58408 - DNA, 20 bp, synthetic construct
  misc_feature 1..20: note = chemically synthesized
  source 1..20: mol_type = other DNA
ggggcatggccaggcttaaa

SEQ ID NO: 58409 - DNA, 20 bp, synthetic construct
  misc_feature 1..20: note = chemically synthesized
  source 1..20: mol_type = other DNA
caggaagtgccattcccaaa

SEQ ID NO: 58410 - DNA, 20 bp, synthetic construct
  misc_feature 1..20: note = chemically synthesized
  source 1..20: mol_type = other DNA
agaaggccatggaagacatg

SEQ ID NO: 58411 - DNA, 20 bp, synthetic construct
  misc_feature 1..20: note = chemically synthesized
  source 1..20: mol_type = other DNA
gtgcgctctgactgcgagag

SEQ ID NO: 58412 - DNA, 20 bp, synthetic construct
  misc_feature 1..20: note = chemically synthesized
  source 1..20: mol_type = other DNA
gtaggtgccaggcaacctcc

SEQ ID NO: 58413 - DNA, 20 bp, synthetic construct
  misc_feature 1..20: note = chemically synthesized
  source 1..20: mol_type = other DNA
ttacaacaaaagagacacaa

SEQ ID NO: 58414 - DNA, 20 bp, synthetic construct
  misc_feature 1..20: note = chemically synthesized
  source 1..20: mol_type = other DNA
cccctcccccatgccccagt

SEQ ID NO: 58415 - DNA, 20 bp, synthetic construct
  misc_feature 1..20: note = chemically synthesized
  source 1..20: mol_type = other DNA
ggagccaggaaaccgtggac

SEQ ID NO: 58416 - DNA, 20 bp, synthetic construct
  misc_feature 1..20: note = chemically synthesized
  source 1..20: mol_type = other DNA
ataggcctgctgggaaagtc

SEQ ID NO: 58417 - DNA, 20 bp, synthetic construct
  misc_feature 1..20: note = chemically synthesized
  source 1..20: mol_type = other DNA
gctctacaaatgcaggcaga

SEQ ID NO: 58418 - DNA, 20 bp, synthetic construct
  misc_feature 1..20: note = chemically synthesized
  source 1..20: mol_type = other DNA
ccttttgtgttgctatataa

SEQ ID NO: 58419 - DNA, 20 bp, synthetic construct
  misc_feature 1..20: note = chemically synthesized
  source 1..20: mol_type = other DNA
atataaaggaatacctgaag

SEQ ID NO: 58420 - DNA, 20 bp, synthetic construct
  misc_feature 1..20: note = chemically synthesized
  source 1..20: mol_type = other DNA
gtgagtaatttacaaggaaa

SEQ ID NO: 58421 - DNA, 20 bp, synthetic construct
  misc_feature 1..20: note = chemically synthesized
  source 1..20: mol_type = other DNA
gacggcaccaagcctttcac

SEQ ID NO: 58422 - DNA, 20 bp, synthetic construct
  misc_feature 1..20: note = chemically synthesized
  source 1..20: mol_type = other DNA
cactggctccccacagcctc

SEQ ID NO: 58423 - DNA, 20 bp, synthetic construct
  misc_feature 1..20: note = chemically synthesized
  source 1..20: mol_type = other DNA
tatgcatcttggactccagt

SEQ ID NO: 58424 - DNA, 20 bp, synthetic construct
  misc_feature 1..20: note = chemically synthesized
  source 1..20: mol_type = other DNA
ggactccagtcagagtagaa

SEQ ID NO: 58425 - DNA, 20 bp, synthetic construct
  misc_feature 1..20: note = chemically synthesized
  source 1..20: mol_type = other DNA
ttttgaacctcagaacttgt

SEQ ID NO: 58426 - DNA, 20 bp, synthetic construct
  misc_feature 1..20: note = chemically synthesized
  source 1..20: mol_type = other DNA
gaaaggcagtaatgggcaat

SEQ ID NO: 58427 - DNA, 20 bp, synthetic construct
  misc_feature 1..20: note = chemically synthesized
  source 1..20: mol_type = other DNA
ggcaatcagagtctgcttgg

SEQ ID NO: 58428 - DNA, 20 bp, synthetic construct
  misc_feature 1..20: note = chemically synthesized
  source 1..20: mol_type = other DNA
taatctatgcagcaaaatat

SEQ ID NO: 58429 - DNA, 20 bp, synthetic construct
  misc_feature 1..20: note = chemically synthesized
  source 1..20: mol_type = other DNA
aacattttacatttcagacg

SEQ ID NO: 58430 - DNA, 20 bp, synthetic construct
  misc_feature 1..20: note = chemically synthesized
  source 1..20: mol_type = other DNA
actttgggaggctgaggcgg

SEQ ID NO: 58431 - DNA, 20 bp, synthetic construct
  misc_feature 1..20: note = chemically synthesized
  source 1..20: mol_type = other DNA
gaggcgggaggatcacctcc

SEQ ID NO: 58432 - DNA, 20 bp, synthetic construct
  misc_feature 1..20: note = chemically synthesized
  source 1..20: mol_type = other DNA
tcggatccactgaggaggtc

SEQ ID NO: 58433 - DNA, 20 bp, synthetic construct
  misc_feature 1..20: note = chemically synthesized
  source 1..20: mol_type = other DNA
ttcatggtacctcctaatcc

SEQ ID NO: 58434 - DNA, 20 bp, synthetic construct
  misc_feature 1..20: note = chemically synthesized
  source 1..20: mol_type = other DNA
tgccttccgctaaataaaaa

SEQ ID NO: 58435 - DNA, 20 bp, synthetic construct
  misc_feature 1..20: note = chemically synthesized
  source 1..20: mol_type = other DNA
ttccgctaaataaaaattga

SEQ ID NO: 58436 - DNA, 20 bp, synthetic construct
  misc_feature 1..20: note = chemically synthesized
  source 1..20: mol_type = other DNA
ataaaaattgaatgaattgg

SEQ ID NO: 58437 - DNA, 20 bp, synthetic construct
  misc_feature 1..20: note = chemically synthesized
  source 1..20: mol_type = other DNA
tgggagagtactctgtgcag

SEQ ID NO: 58438 - DNA, 20 bp, synthetic construct
  misc_feature 1..20: note = chemically synthesized
  source 1..20: mol_type = other DNA
aaacccagttctaatgcacc

SEQ ID NO: 58439 - DNA, 20 bp, synthetic construct
  misc_feature 1..20: note = chemically synthesized
  source 1..20: mol_type = other DNA
gtttctcatgactaaaagaa

SEQ ID NO: 58440 - DNA, 20 bp, synthetic construct
  misc_feature 1..20: note = chemically synthesized
  source 1..20: mol_type = other DNA
cgattcccacaaaataacca

SEQ ID NO: 58441 - DNA, 20 bp, synthetic construct
  misc_feature 1..20: note = chemically synthesized
  source 1..20: mol_type = other DNA
tcccacaaaataaccattga

SEQ ID NO: 58442 - DNA, 20 bp, synthetic construct
  misc_feature 1..20: note = chemically synthesized
  source 1..20: mol_type = other DNA
acaaaataaccattgaatga

SEQ ID NO: 58443 - DNA, 20 bp, synthetic construct
  misc_feature 1..20: note = chemically synthesized
  source 1..20: mol_type = other DNA
gcctctgcttactcacctct

SEQ ID NO: 58444 - DNA, 20 bp, synthetic construct
  misc_feature 1..20: note = chemically synthesized
  source 1..20: mol_type = other DNA
tgcttactcacctctcagga

SEQ ID NO: 58445 - DNA, 20 bp, synthetic construct
  misc_feature 1..20: note = chemically synthesized
  source 1..20: mol_type = other DNA
aggaagagggctatactgag

SEQ ID NO: 58446 - DNA, 20 bp, synthetic construct
  misc_feature 1..20: note = chemically synthesized
  source 1..20: mol_type = other DNA
agaagcgtgggcaggcagct

SEQ ID NO: 58447 - DNA, 20 bp, synthetic construct
  misc_feature 1..20: note = chemically synthesized
  source 1..20: mol_type = other DNA
gggcaggcagctgtgagtgg

SEQ ID NO: 58448 - DNA, 20 bp, synthetic construct
  misc_feature 1..20: note = chemically synthesized
  source 1..20: mol_type = other DNA
agattaggcaatggaggctc

SEQ ID NO: 58449 - DNA, 20 bp, synthetic construct
  misc_feature 1..20: note = chemically synthesized
  source 1..20: mol_type = other DNA
gcctgagggccagaagctgg

SEQ ID NO: 58450 - DNA, 20 bp, synthetic construct
  misc_feature 1..20: note = chemically synthesized
  source 1..20: mol_type = other DNA
tgaggcgccgggctcagctc

SEQ ID NO: 58451 - DNA, 20 bp, synthetic construct
  misc_feature 1..20: note = chemically synthesized
  source 1..20: mol_type = other DNA
caccaagggcccttccctgc

SEQ ID NO: 58452 - DNA, 20 bp, synthetic construct
  misc_feature 1..20: note = chemically synthesized
  source 1..20: mol_type = other DNA
aaaggacgccaatgggcctc

SEQ ID NO: 58453 - DNA, 20 bp, synthetic construct
  misc_feature 1..20: note = chemically synthesized
  source 1..20: mol_type = other DNA
ttttcttcggctgaaacaga

SEQ ID NO: 58454 - DNA, 20 bp, synthetic construct
  misc_feature 1..20: note = chemically synthesized
  source 1..20: mol_type = other DNA
aacagatggaatactagagc

SEQ ID NO: 58455 - DNA, 20 bp, synthetic construct
  misc_feature 1..20: note = chemically synthesized
  source 1..20: mol_type = other DNA
cttcccaccccgcccctgtc

SEQ ID NO: 58456 - DNA, 20 bp, synthetic construct
  misc_feature 1..20: note = chemically synthesized
  source 1..20: mol_type = other DNA
cagaaactgggaaatctggg

SEQ ID NO: 58457 - DNA, 20 bp, synthetic construct
  misc_feature 1..20: note = chemically synthesized
  source 1..20: mol_type = other DNA
tgctcgcccttcctcggcct

SEQ ID NO: 58458 - DNA, 20 bp, synthetic construct
  misc_feature 1..20: note = chemically synthesized
  source 1..20: mol_type = other DNA
caaccccgcgaaccttccca

SEQ ID NO: 58459 - DNA, 20 bp, synthetic construct
  misc_feature 1..20: note = chemically synthesized
  source 1..20: mol_type = other DNA
agcaccgcaccgtcccggct

SEQ ID NO: 58460 - DNA, 20 bp, synthetic construct
  misc_feature 1..20: note = chemically synthesized
  source 1..20: mol_type = other DNA
aggtggctgtggttccgtgc

SEQ ID NO: 58461 - DNA, 20 bp, synthetic construct
  misc_feature 1..20: note = chemically synthesized
  source 1..20: mol_type = other DNA
agggcgcgtgaaggggcgcg

SEQ ID NO: 58462 - DNA, 20 bp, synthetic construct
  misc_feature 1..20: note = chemically synthesized
  source 1..20: mol_type = other DNA
acgtcgctgcggaaaccttc

SEQ ID NO: 58463 - DNA, 20 bp, synthetic construct
  misc_feature 1..20: note = chemically synthesized
  source 1..20: mol_type = other DNA
ctgcggaaaccttctagggt

SEQ ID NO: 58464 - DNA, 20 bp, synthetic construct
  misc_feature 1..20: note = chemically synthesized
  source 1..20: mol_type = other DNA
ttaacggaacccccggactg

SEQ ID NO: 58465 - DNA, 20 bp, synthetic construct
  misc_feature 1..20: note = chemically synthesized
  source 1..20: mol_type = other DNA
ctcccgcctctcaccctgcg

SEQ ID NO: 58466 - DNA, 20 bp, synthetic construct
  misc_feature 1..20: note = chemically synthesized
  source 1..20: mol_type = other DNA
gcccaccttttcagtgtttc

SEQ ID NO: 58467 - DNA, 20 bp, synthetic construct
  misc_feature 1..20: note = chemically synthesized
  source 1..20: mol_type = other DNA
cctgctgaccagtgagactt

SEQ ID NO: 58468 - DNA, 20 bp, synthetic construct
  misc_feature 1..20: note = chemically synthesized
  source 1..20: mol_type = other DNA
tgtggactcctcgctgccca

SEQ ID NO: 58469 - DNA, 20 bp, synthetic construct
  misc_feature 1..20: note = chemically synthesized
  source 1..20: mol_type = other DNA
tccagcctacatgcatttca

SEQ ID NO: 58470 - DNA, 20 bp, synthetic construct
  misc_feature 1..20: note = chemically synthesized
  source 1..20: mol_type = other DNA
agacgtcatataggtacatt

SEQ ID NO: 58471 - DNA, 20 bp, synthetic construct
  misc_feature 1..20: note = chemically synthesized
  source 1..20: mol_type = other DNA
acctattgtgtaccaggcag

SEQ ID NO: 58472 - DNA, 20 bp, synthetic construct
  misc_feature 1..20: note = chemically synthesized
  source 1..20: mol_type = other DNA
gatactgggaagaaacaaag

SEQ ID NO: 58473 - DNA, 20 bp, synthetic construct
  misc_feature 1..20: note = chemically synthesized
  source 1..20: mol_type = other DNA
ttgcagatgcacagcagatt

SEQ ID NO: 58474 - DNA, 20 bp, synthetic construct
  misc_feature 1..20: note = chemically synthesized
  source 1..20: mol_type = other DNA
tccgagtgaaatggcctgct

SEQ ID NO: 58475 - DNA, 20 bp, synthetic construct
  misc_feature 1..20: note = chemically synthesized
  source 1..20: mol_type = other DNA
cctgctctgaatctaggtgc

SEQ ID NO: 58476 - DNA, 20 bp, synthetic construct
  misc_feature 1..20: note = chemically synthesized
  source 1..20: mol_type = other DNA
gcacaaagacagtgcaacca

SEQ ID NO: 58477 - DNA, 20 bp, synthetic construct
  misc_feature 1..20: note = chemically synthesized
  source 1..20: mol_type = other DNA
gtgactccatgaggtaaggt

SEQ ID NO: 58478 - DNA, 20 bp, synthetic construct
  misc_feature 1..20: note = chemically synthesized
  source 1..20: mol_type = other DNA
tcgagcccgccatcgcagca

SEQ ID NO: 58479 - DNA, 20 bp, synthetic construct
  misc_feature 1..20: note = chemically synthesized
  source 1..20: mol_type = other DNA
tccttcctgttgcctgtaat

SEQ ID NO: 58480 - DNA, 20 bp, synthetic construct
  misc_feature 1..20: note = chemically synthesized
  source 1..20: mol_type = other DNA
tcaaaggcctcccctggagc

SEQ ID NO: 58481 - DNA, 20 bp, synthetic construct
  misc_feature 1..20: note = chemically synthesized
  source 1..20: mol_type = other DNA
gaccttggcctctcacctac

SEQ ID NO: 58482 - DNA, 20 bp, synthetic construct
  misc_feature 1..20: note = chemically synthesized
  source 1..20: mol_type = other DNA
tcccagtatcgacagccctt

SEQ ID NO: 58483 - DNA, 20 bp, synthetic construct
  misc_feature 1..20: note = chemically synthesized
  source 1..20: mol_type = other DNA
aagctgagcttgtgcctacc

SEQ ID NO: 58484 - DNA, 20 bp, synthetic construct
  misc_feature 1..20: note = chemically synthesized
  source 1..20: mol_type = other DNA
tgccaggttaaggccagtgg

SEQ ID NO: 58485 - DNA, 20 bp, synthetic construct
  misc_feature 1..20: note = chemically synthesized
  source 1..20: mol_type = other DNA
ctgggaactgcaccaggcac

SEQ ID NO: 58486 - DNA, 20 bp, synthetic construct
  misc_feature 1..20: note = chemically synthesized
  source 1..20: mol_type = other DNA
gtattccatctgtttcagcc

SEQ ID NO: 58487 - DNA, 20 bp, synthetic construct
  misc_feature 1..20: note = chemically synthesized
  source 1..20: mol_type = other DNA
ttgtggggttgtggccagga

SEQ ID NO: 58488 - DNA, 20 bp, synthetic construct
  misc_feature 1..20: note = chemically synthesized
  source 1..20: mol_type = other DNA
ttattttgtgggaatcgaat

SEQ ID NO: 58489 - DNA, 20 bp, synthetic construct
  misc_feature 1..20: note = chemically synthesized
  source 1..20: mol_type = other DNA
atgaaaatattttttggcaa

SEQ ID NO: 58490 - DNA, 20 bp, synthetic construct
  misc_feature 1..20: note = chemically synthesized
  source 1..20: mol_type = other DNA
caatccttttcttttagtca

SEQ ID NO: 58491 - DNA, 20 bp, synthetic construct
  misc_feature 1..20: note = chemically synthesized
  source 1..20: mol_type = other DNA
gttcagcgatgatggtgtca

SEQ ID NO: 58492 - DNA, 20 bp, synthetic construct
  misc_feature 1..20: note = chemically synthesized
  source 1..20: mol_type = other DNA
ccatgcttcctggagagctt

SEQ ID NO: 58493 - DNA, 20 bp, synthetic construct
  misc_feature 1..20: note = chemically synthesized
  source 1..20: mol_type = other DNA
agtaactactggctttctgt

SEQ ID NO: 58494 - DNA, 20 bp, synthetic construct
  misc_feature 1..20: note = chemically synthesized
  source 1..20: mol_type = other DNA
gtcacatcttcggtggaggg

SEQ ID NO: 58495 - DNA, 20 bp, synthetic construct
  misc_feature 1..20: note = chemically synthesized
  source 1..20: mol_type = other DNA
aagcactagggccagggtga

SEQ ID NO: 58496 - DNA, 20 bp, synthetic construct
  misc_feature 1..20: note = chemically synthesized
  source 1..20: mol_type = other DNA
aggcagcagatgcattggca

SEQ ID NO: 58497 - DNA, 20 bp, synthetic construct
  misc_feature 1..20: note = chemically synthesized
  source 1..20: mol_type = other DNA
aggcttaaagggaattctat

SEQ ID NO: 58498 - DNA, 20 bp, synthetic construct
  misc_feature 1..20: note = chemically synthesized
  source 1..20: mol_type = other DNA
aggaggaacatgatgacatg

SEQ ID NO: 58499 - DNA, 20 bp, synthetic construct
  misc_feature 1..20: note = chemically synthesized
  source 1..20: mol_type = other DNA
ccccctcccccatgccccag

SEQ ID NO: 58500 - DNA, 20 bp, synthetic construct
  misc_feature 1..20: note = chemically synthesized
  source 1..20: mol_type = other DNA
aggcaacacttcttaaagag

SEQ ID NO: 58501 - DNA, 20 bp, synthetic construct
  misc_feature 1..20: note = chemically synthesized
  source 1..20: mol_type = other DNA
cctcagaacttgtttggatt

SEQ ID NO: 58502 - DNA, 20 bp, synthetic construct
  misc_feature 1..20: note = chemically synthesized
  source 1..20: mol_type = other DNA
gggcaatcagagtctgcttg

SEQ ID NO: 58503 - DNA, 20 bp, synthetic construct
  misc_feature 1..20: note = chemically synthesized
  source 1..20: mol_type = other DNA
gaaactccatctcaaaaaaa

SEQ ID NO: 58504 - DNA, 20 bp, synthetic construct
  misc_feature 1..20: note = chemically synthesized
  source 1..20: mol_type = other DNA
gttcatggtacctcctaatc

SEQ ID NO: 58505 - DNA, 20 bp, synthetic construct
  misc_feature 1..20: note = chemically synthesized
  source 1..20: mol_type = other DNA
gcctcagtttctcatgacta

SEQ ID NO: 58506 - DNA, 20 bp, synthetic construct
  misc_feature 1..20: note = chemically synthesized
  source 1..20: mol_type = other DNA
tgttccaaacttccaccaga

SEQ ID NO: 58507 - DNA, 20 bp, synthetic construct
  misc_feature 1..20: note = chemically synthesized
  source 1..20: mol_type = other DNA
cacaaccccacaacatccct

SEQ ID NO: 58508 - DNA, 20 bp, synthetic construct
  misc_feature 1..20: note = chemically synthesized
  source 1..20: mol_type = other DNA
tgggcaggcagctgtgagtg

SEQ ID NO: 58509 - DNA, 20 bp, synthetic construct
  misc_feature 1..20: note = chemically synthesized
  source 1..20: mol_type = other DNA
aagtcctgggctggtaatac

SEQ ID NO: 58510 - DNA, 20 bp, synthetic construct
  misc_feature 1..20: note = chemically synthesized
  source 1..20: mol_type = other DNA
taaaggacgccaatgggcct

SEQ ID NO: 58511 - DNA, 20 bp, synthetic construct
  misc_feature 1..20: note = chemically synthesized
  source 1..20: mol_type = other DNA
gagcatgagttctgtgtcat

SEQ ID NO: 58512 - DNA, 20 bp, synthetic construct
  misc_feature 1..20: note = chemically synthesized
  source 1..20: mol_type = other DNA
cccacctgtgccgcggcgag

SEQ ID NO: 58513 - DNA, 20 bp, synthetic construct
  misc_feature 1..20: note = chemically synthesized
  source 1..20: mol_type = other DNA
cgtcagattacgcgcagagg

SEQ ID NO: 58514 - DNA, 20 bp, synthetic construct
  misc_feature 1..20: note = chemically synthesized
  source 1..20: mol_type = other DNA
aagacgtcatataggtacat

SEQ ID NO: 58515 - DNA, 20 bp, synthetic construct
  misc_feature 1..20: note = chemically synthesized
  source 1..20: mol_type = other DNA
ttccttttacacaccatgtt

SEQ ID NO: 58516 - DNA, 20 bp, synthetic construct
  misc_feature 1..20: note = chemically synthesized
  source 1..20: mol_type = other DNA
ggaagggctgtcgatactgg

SEQ ID NO: 58517 - DNA, 20 bp, synthetic construct
  misc_feature 1..20: note = chemically synthesized
  source 1..20: mol_type = other DNA
atcaaaggcctcccctggag

SEQ ID NO: 58518 - DNA, 20 bp, synthetic construct
  misc_feature 1..20: note = chemically synthesized
  source 1..20: mol_type = other DNA
atatgacgtctttgcaaact

SEQ ID NO: 58519 - DNA, 20 bp, synthetic construct
  misc_feature 1..20: note = chemically synthesized
  source 1..20: mol_type = other DNA
gtgggttccgatttggtttg

SEQ ID NO: 58520 - DNA, 20 bp, synthetic construct
  misc_feature 1..20: note = chemically synthesized
  source 1..20: mol_type = other DNA
atttcaagttaccactgctc

SEQ ID NO: 58521 - DNA, 20 bp, synthetic construct
  misc_feature 1..20: note = chemically synthesized
  source 1..20: mol_type = other DNA
gaacaaagatacagagctgg

SEQ ID NO: 58522 - DNA, 20 bp, synthetic construct
  misc_feature 1..20: note = chemically synthesized
  source 1..20: mol_type = other DNA
tctgaaatgtaaaatgttac

SEQ ID NO: 58523 - DNA, 20 bp, synthetic construct
  misc_feature 1..20: note = chemically synthesized
  source 1..20: mol_type = other DNA
tccaaacaagttctgaggtt

SEQ ID NO: 58524 - DNA, 20 bp, synthetic construct
  misc_feature 1..20: note = chemically synthesized
  source 1..20: mol_type = other DNA
agttggagcagacaagagct

SEQ ID NO: 58525 - DNA, 20 bp, synthetic construct
  misc_feature 1..20: note = chemically synthesized
  source 1..20: mol_type = other DNA
agctgggtgcaggtacagag

SEQ ID NO: 58526 - DNA, 20 bp, synthetic construct
  misc_feature 1..20: note = chemically synthesized
  source 1..20: mol_type = other DNA
cctagtgcttcaaatcttaa

SEQ ID NO: 58527 - DNA, 20 bp, synthetic construct
  misc_feature 1..20: note = chemically synthesized
  source 1..20: mol_type = other DNA
ggtggtgcagaagcacaaat

SEQ ID NO: 58528 - DNA, 20 bp, synthetic construct
  misc_feature 1..20: note = chemically synthesized
  source 1..20: mol_type = other DNA
tttacccaaagccttagggc

SEQ ID NO: 58529 - DNA, 20 bp, synthetic construct
  misc_feature 1..20: note = chemically synthesized
  source 1..20: mol_type = other DNA
accatcaaataaatcacaaa

SEQ ID NO: 58530 - DNA, 20 bp, synthetic construct
  misc_feature 1..20: note = chemically synthesized
  source 1..20: mol_type = other DNA
ggtcacactgcagacaggga

SEQ ID NO: 58531 - DNA, 20 bp, synthetic construct
  misc_feature 1..20: note = chemically synthesized
  source 1..20: mol_type = other DNA
gattacgcgcagagggaaga

SEQ ID NO: 58532 - DNA, 20 bp, synthetic construct
  misc_feature 1..20: note = chemically synthesized
  source 1..20: mol_type = other DNA
atcaactttggactccagca

SEQ ID NO: 58533 - DNA, 20 bp, synthetic construct
  misc_feature 1..20: note = chemically synthesized
  source 1..20: mol_type = other DNA
agggaggatcataaattcgc

SEQ ID NO: 58534 - DNA, 20 bp, synthetic construct
  misc_feature 1..20: note = chemically synthesized
  source 1..20: mol_type = other DNA
cctcctgcctggtacacaat

SEQ ID NO: 58535 - DNA, 20 bp, synthetic construct
  misc_feature 1..20: note = chemically synthesized
  source 1..20: mol_type = other DNA
gtacacaataggtgtttact

SEQ ID NO: 58536 - DNA, 20 bp, synthetic construct
  misc_feature 1..20: note = chemically synthesized
  source 1..20: mol_type = other DNA
tgtttactggatgcttgtcc

SEQ ID NO: 58537 - DNA, 20 bp, synthetic construct
  misc_feature 1..20: note = chemically synthesized
  source 1..20: mol_type = other DNA
aaattgaatcttctggaaag

SEQ ID NO: 58538 - DNA, 20 bp, synthetic construct
  misc_feature 1..20: note = chemically synthesized
  source 1..20: mol_type = other DNA
gaggccggagggggtccagg

SEQ ID NO: 58539 - DNA, 20 bp, synthetic construct
  misc_feature 1..20: note = chemically synthesized
  source 1..20: mol_type = other DNA
tgggcagcgaggagtccaca

SEQ ID NO: 58540 - DNA, 20 bp, synthetic construct
  misc_feature 1..20: note = chemically synthesized
  source 1..20: mol_type = other DNA
cagcgaggagtccacagtag

SEQ ID NO: 58541 - DNA, 20 bp, synthetic construct
  misc_feature 1..20: note = chemically synthesized
  source 1..20: mol_type = other DNA
cggcctgccttccagcccag

SEQ ID NO: 58542 - DNA, 20 bp, synthetic construct
  misc_feature 1..20: note = chemically synthesized
  source 1..20: mol_type = other DNA
ttccagcccagttaggattt

SEQ ID NO: 58543 - DNA, 20 bp, synthetic construct
  misc_feature 1..20: note = chemically synthesized
  source 1..20: mol_type = other DNA
tccctctgcgcgtaatctga

SEQ ID NO: 58544 - DNA, 20 bp, synthetic construct
  misc_feature 1..20: note = chemically synthesized
  source 1..20: mol_type = other DNA
ctccagtccgggggttccgt

SEQ ID NO: 58545 - DNA, 20 bp, synthetic construct
  misc_feature 1..20: note = chemically synthesized
  source 1..20: mol_type = other DNA
cgtcaagcacccacacccta

SEQ ID NO: 58546 - DNA, 20 bp, synthetic construct
  misc_feature 1..20: note = chemically synthesized
  source 1..20: mol_type = other DNA
cagcggctcccagctcccag

SEQ ID NO: 58547 - DNA, 20 bp, synthetic construct
  misc_feature 1..20: note = chemically synthesized
  source 1..20: mol_type = other DNA
ccgcagccgggacggtgcgg

SEQ ID NO: 58548 - DNA, 20 bp, synthetic construct
  misc_feature 1..20: note = chemically synthesized
  source 1..20: mol_type = other DNA
ggtgctgtttcctctcgggc

SEQ ID NO: 58549 - DNA, 20 bp, synthetic construct
  misc_feature 1..20: note = chemically synthesized
  source 1..20: mol_type = other DNA
agtgcaggtcgccgagggct

SEQ ID NO: 58550 - DNA, 20 bp, synthetic construct
  misc_feature 1..20: note = chemically synthesized
  source 1..20: mol_type = other DNA
agcactgccaggatatcctg

SEQ ID NO: 58551 - DNA, 20 bp, synthetic construct
  misc_feature 1..20: note = chemically synthesized
  source 1..20: mol_type = other DNA
aggatatcctgcccagattt

SEQ ID NO: 58552 - DNA, 20 bp, synthetic construct
  misc_feature 1..20: note = chemically synthesized
  source 1..20: mol_type = other DNA
ctgcaccaggcacagagaaa

SEQ ID NO: 58553 - DNA, 20 bp, synthetic construct
  misc_feature 1..20: note = chemically synthesized
  source 1..20: mol_type = other DNA
gggcttgccattatagtggg

SEQ ID NO: 58554 - DNA, 20 bp, synthetic construct
  misc_feature 1..20: note = chemically synthesized
  source 1..20: mol_type = other DNA
gccattatagtgggttccga

SEQ ID NO: 58555 - DNA, 20 bp, synthetic construct
  misc_feature 1..20: note = chemically synthesized
  source 1..20: mol_type = other DNA
aactcatgctctagtattcc

SEQ ID NO: 58556 - DNA, 20 bp, synthetic construct
  misc_feature 1..20: note = chemically synthesized
  source 1..20: mol_type = other DNA
gtctgccgaccgtgtgcggg

SEQ ID NO: 58557 - DNA, 20 bp, synthetic construct
  misc_feature 1..20: note = chemically synthesized
  source 1..20: mol_type = other DNA
cgagtttgctcaacaactct

SEQ ID NO: 58558 - DNA, 20 bp, synthetic construct
  misc_feature 1..20: note = chemically synthesized
  source 1..20: mol_type = other DNA
cttctggccctcaggctgtg

SEQ ID NO: 58559 - DNA, 20 bp, synthetic construct
  misc_feature 1..20: note = chemically synthesized
  source 1..20: mol_type = other DNA
cttcttcccggggcgagacc

SEQ ID NO: 58560 - DNA, 20 bp, synthetic construct
  misc_feature 1..20: note = chemically synthesized
  source 1..20: mol_type = other DNA
ttggctgaggttctgtgtcc

SEQ ID NO: 58561 - DNA, 20 bp, synthetic construct
  misc_feature 1..20: note = chemically synthesized
  source 1..20: mol_type = other DNA
agtcagatgtggggttgaat

SEQ ID NO: 58562 - DNA, 20 bp, synthetic construct
  misc_feature 1..20: note = chemically synthesized
  source 1..20: mol_type = other DNA
tggcttcctctcactagctg

SEQ ID NO: 58563 - DNA, 20 bp, synthetic construct
  misc_feature 1..20: note = chemically synthesized
  source 1..20: mol_type = other DNA
caagccccggggggatcact

SEQ ID NO: 58564 - DNA, 20 bp, synthetic construct
  misc_feature 1..20: note = chemically synthesized
  source 1..20: mol_type = other DNA
tgccactcacagctgcctgc

SEQ ID NO: 58565 - DNA, 20 bp, synthetic construct
  misc_feature 1..20: note = chemically synthesized
  source 1..20: mol_type = other DNA
cacctgaaccaagcccttga

SEQ ID NO: 58566 - DNA, 20 bp, synthetic construct
  misc_feature 1..20: note = chemically synthesized
  source 1..20: mol_type = other DNA
gaggatgtttcttctctggt

SEQ ID NO: 58567 - DNA, 20 bp, synthetic construct
  misc_feature 1..20: note = chemically synthesized
  source 1..20: mol_type = other DNA
tcaccccaggtgcattagaa

SEQ ID NO: 58568 - DNA, 20 bp, synthetic construct
  misc_feature 1..20: note = chemically synthesized
  source 1..20: mol_type = other DNA
ggtgtcatgagaattttatt

SEQ ID NO: 58569 - DNA, 20 bp, synthetic construct
  misc_feature 1..20: note = chemically synthesized
  source 1..20: mol_type = other DNA
tttttcttttttttttgaga

SEQ ID NO: 58570 - DNA, 20 bp, synthetic construct
  misc_feature 1..20: note = chemically synthesized
  source 1..20: mol_type = other DNA
tgcctcagcctcccaagaag

SEQ ID NO: 58571 - DNA, 20 bp, synthetic construct
  misc_feature 1..20: note = chemically synthesized
  source 1..20: mol_type = other DNA
ttttgtatttttagtagaga

SEQ ID NO: 58572 - DNA, 20 bp, synthetic construct
  misc_feature 1..20: note = chemically synthesized
  source 1..20: mol_type = other DNA
tgtaaaatgttacgaaaacc

SEQ ID NO: 58573 - DNA, 20 bp, synthetic construct
  misc_feature 1..20: note = chemically synthesized
  source 1..20: mol_type = other DNA
acgaaaaccaaaagtttttt

SEQ ID NO: 58574 - DNA, 20 bp, synthetic construct
  misc_feature 1..20: note = chemically synthesized
  source 1..20: mol_type = other DNA
agcacctgacgtgaactgac

SEQ ID NO: 58575 - DNA, 20 bp, synthetic construct
  misc_feature 1..20: note = chemically synthesized
  source 1..20: mol_type = other DNA
catattcatatattttgctg

SEQ ID NO: 58576 - DNA, 20 bp, synthetic construct
  misc_feature 1..20: note = chemically synthesized
  source 1..20: mol_type = other DNA
catagattacagtatgcagc

SEQ ID NO: 58577 - DNA, 20 bp, synthetic construct
  misc_feature 1..20: note = chemically synthesized
  source 1..20: mol_type = other DNA
tccagattcttccaagcaga

SEQ ID NO: 58578 - DNA, 20 bp, synthetic construct
  misc_feature 1..20: note = chemically synthesized
  source 1..20: mol_type = other DNA
aaacaagttctgaggttcaa

SEQ ID NO: 58579 - DNA, 20 bp, synthetic construct
  misc_feature 1..20: note = chemically synthesized
  source 1..20: mol_type = other DNA
gttcaaaaccgttttggccc

SEQ ID NO: 58580 - DNA, 20 bp, synthetic construct
  misc_feature 1..20: note = chemically synthesized
  source 1..20: mol_type = other DNA
gtaggggccaaggaggagca

SEQ ID NO: 58581 - DNA, 20 bp, synthetic construct
  misc_feature 1..20: note = chemically synthesized
  source 1..20: mol_type = other DNA
aggaggagcatggagtttgg

SEQ ID NO: 58582 - DNA, 20 bp, synthetic construct
  misc_feature 1..20: note = chemically synthesized
  source 1..20: mol_type = other DNA
catagatagtggctgctata

SEQ ID NO: 58583 - DNA, 20 bp, synthetic construct
  misc_feature 1..20: note = chemically synthesized
  source 1..20: mol_type = other DNA
tggaagtggggcctaatggg

SEQ ID NO: 58584 - DNA, 20 bp, synthetic construct
  misc_feature 1..20: note = chemically synthesized
  source 1..20: mol_type = other DNA
atgggggaggaacccctgtg

SEQ ID NO: 58585 - DNA, 20 bp, synthetic construct
  misc_feature 1..20: note = chemically synthesized
  source 1..20: mol_type = other DNA
ataatgagtaagttctcccg

SEQ ID NO: 58586 - DNA, 20 bp, synthetic construct
  misc_feature 1..20: note = chemically synthesized
  source 1..20: mol_type = other DNA
ccgctatgatttcccttgaa

SEQ ID NO: 58587 - DNA, 20 bp, synthetic construct
  misc_feature 1..20: note = chemically synthesized
  source 1..20: mol_type = other DNA
cttgaaggctgattattaaa

SEQ ID NO: 58588 - DNA, 20 bp, synthetic construct
  misc_feature 1..20: note = chemically synthesized
  source 1..20: mol_type = other DNA
tggcacctccctctcttctc

SEQ ID NO: 58589 - DNA, 20 bp, synthetic construct
  misc_feature 1..20: note = chemically synthesized
  source 1..20: mol_type = other DNA
ctcttgcttcttctcttgcc

SEQ ID NO: 58590 - DNA, 20 bp, synthetic construct
  misc_feature 1..20: note = chemically synthesized
  source 1..20: mol_type = other DNA
caccttctgccatcagtgaa

SEQ ID NO: 58591 - DNA, 20 bp, synthetic construct
  misc_feature 1..20: note = chemically synthesized
  source 1..20: mol_type = other DNA
accagaagcagatgctggtg

SEQ ID NO: 58592 - DNA, 20 bp, synthetic construct
  misc_feature 1..20: note = chemically synthesized
  source 1..20: mol_type = other DNA
tgctggtgccatgcttcctg

SEQ ID NO: 58593 - DNA, 20 bp, synthetic construct
  misc_feature 1..20: note = chemically synthesized
  source 1..20: mol_type = other DNA
catttgtagagcatctggat

SEQ ID NO: 58594 - DNA, 20 bp, synthetic construct
  misc_feature 1..20: note = chemically synthesized
  source 1..20: mol_type = other DNA
ttggagctggaattcaggtc

SEQ ID NO: 58595 - DNA, 20 bp, synthetic construct
  misc_feature 1..20: note = chemically synthesized
  source 1..20: mol_type = other DNA
cggtttcctggctccaaagc

SEQ ID NO: 58596 - DNA, 20 bp, synthetic construct
  misc_feature 1..20: note = chemically synthesized
  source 1..20: mol_type = other DNA
tggcctatatgagttcttta

SEQ ID NO: 58597 - DNA, 20 bp, synthetic construct
  misc_feature 1..20: note = chemically synthesized
  source 1..20: mol_type = other DNA
ggggtgagataaagtacacc

SEQ ID NO: 58598 - DNA, 20 bp, synthetic construct
  misc_feature 1..20: note = chemically synthesized
  source 1..20: mol_type = other DNA
taaagtacacctagggtttg

SEQ ID NO: 58599 - DNA, 20 bp, synthetic construct
  misc_feature 1..20: note = chemically synthesized
  source 1..20: mol_type = other DNA
atgtcttccatggccttctt

SEQ ID NO: 58600 - DNA, 20 bp, synthetic construct
  misc_feature 1..20: note = chemically synthesized
  source 1..20: mol_type = other DNA
cactgcatatacactgggga

SEQ ID NO: 58601 - DNA, 20 bp, synthetic construct
  misc_feature 1..20: note = chemically synthesized
  source 1..20: mol_type = other DNA
gggtaccaagcacagtaact

SEQ ID NO: 58602 - DNA, 20 bp, synthetic construct
  misc_feature 1..20: note = chemically synthesized
  source 1..20: mol_type = other DNA
tattctcctcaccctggccc

SEQ ID NO: 58603 - DNA, 20 bp, synthetic construct
  misc_feature 1..20: note = chemically synthesized
  source 1..20: mol_type = other DNA
tagtgcttcaaatcttaaaa

SEQ ID NO: 58604 - DNA, 20 bp, synthetic construct
  misc_feature 1..20: note = chemically synthesized
  source 1..20: mol_type = other DNA
tcttaaaaaaacgtttttat

SEQ ID NO: 58605 - DNA, 20 bp, synthetic construct
  misc_feature 1..20: note = chemically synthesized
  source 1..20: mol_type = other DNA
tggtgcagaagcacaaataa

SEQ ID NO: 58606 - DNA, 20 bp, synthetic construct
  misc_feature 1..20: note = chemically synthesized
  source 1..20: mol_type = other DNA
gcacaaataaaaacgttttt

SEQ ID NO: 58607 - DNA, 20 bp, synthetic construct
  misc_feature 1..20: note = chemically synthesized
  source 1..20: mol_type = other DNA
gggacttcactctggatagc

SEQ ID NO: 58608 - DNA, 20 bp, synthetic construct
  misc_feature 1..20: note = chemically synthesized
  source 1..20: mol_type = other DNA
aggaattttggaccctagag

SEQ ID NO: 58609 - DNA, 20 bp, synthetic construct
  misc_feature 1..20: note = chemically synthesized
  source 1..20: mol_type = other DNA
catcccagggccttgtccct

SEQ ID NO: 58610 - DNA, 20 bp, synthetic construct
  misc_feature 1..20: note = chemically synthesized
  source 1..20: mol_type = other DNA
aatggctggcaggcagacca

SEQ ID NO: 58611 - DNA, 20 bp, synthetic construct
  misc_feature 1..20: note = chemically synthesized
  source 1..20: mol_type = other DNA
gacgtaccactggggcatgg

SEQ ID NO: 58612 - DNA, 20 bp, synthetic construct
  misc_feature 1..20: note = chemically synthesized
  source 1..20: mol_type = other DNA
atacagaaagccagtagtta

SEQ ID NO: 58613 - DNA, 20 bp, synthetic construct
  misc_feature 1..20: note = chemically synthesized
  source 1..20: mol_type = other DNA
aatacatacttgctgtcccc

SEQ ID NO: 58614 - DNA, 20 bp, synthetic construct
  misc_feature 1..20: note = chemically synthesized
  source 1..20: mol_type = other DNA
actacgggccacactcgaca

SEQ ID NO: 58615 - DNA, 20 bp, synthetic construct
  misc_feature 1..20: note = chemically synthesized
  source 1..20: mol_type = other DNA
ataaattgagggaaaaaatc

SEQ ID NO: 58616 - DNA, 20 bp, synthetic construct
  misc_feature 1..20: note = chemically synthesized
  source 1..20: mol_type = other DNA
ggtgagtaatttacaaggaa

SEQ ID NO: 58617 - DNA, 20 bp, synthetic construct
  misc_feature 1..20: note = chemically synthesized
  source 1..20: mol_type = other DNA
ggaaaagggatttattcagc

SEQ ID NO: 58618 - DNA, 20 bp, synthetic construct
  misc_feature 1..20: note = chemically synthesized
  source 1..20: mol_type = other DNA
ccaggaagcatggcaccagc

SEQ ID NO: 58619 - DNA, 20 bp, synthetic construct
  misc_feature 1..20: note = chemically synthesized
  source 1..20: mol_type = other DNA
tgcttctggtgagggcctta

SEQ ID NO: 58620 - DNA, 20 bp, synthetic construct
  misc_feature 1..20: note = chemically synthesized
  source 1..20: mol_type = other DNA
actgaggaccaaatttccac

SEQ ID NO: 58621 - DNA, 20 bp, synthetic construct
  misc_feature 1..20: note = chemically synthesized
  source 1..20: mol_type = other DNA
attatagcagccactatcta

SEQ ID NO: 58622 - DNA, 20 bp, synthetic construct
  misc_feature 1..20: note = chemically synthesized
  source 1..20: mol_type = other DNA
agcagccactatctatggtg

SEQ ID NO: 58623 - DNA, 20 bp, synthetic construct
  misc_feature 1..20: note = chemically synthesized
  source 1..20: mol_type = other DNA
ccactatctatggtgatttg

SEQ ID NO: 58624 - DNA, 20 bp, synthetic construct
  misc_feature 1..20: note = chemically synthesized
  source 1..20: mol_type = other DNA
aactgctctcaggcagacat

SEQ ID NO: 58625 - DNA, 20 bp, synthetic construct
  misc_feature 1..20: note = chemically synthesized
  source 1..20: mol_type = other DNA
acccaaagccttagggccaa

SEQ ID NO: 58626 - DNA, 20 bp, synthetic construct
  misc_feature 1..20: note = chemically synthesized
  source 1..20: mol_type = other DNA
aaacggttttgaacctcaga

SEQ ID NO: 58627 - DNA, 20 bp, synthetic construct
  misc_feature 1..20: note = chemically synthesized
  source 1..20: mol_type = other DNA
gttttgaacctcagaacttg

SEQ ID NO: 58628 - DNA, 20 bp, synthetic construct
  misc_feature 1..20: note = chemically synthesized
  source 1..20: mol_type = other DNA
ggcagtaatgggcaatcaga

SEQ ID NO: 58629 - DNA, 20 bp, synthetic construct
  misc_feature 1..20: note = chemically synthesized
  source 1..20: mol_type = other DNA
aataaatcacaaaaaaaact

SEQ ID NO: 58630 - DNA, 20 bp, synthetic construct
  misc_feature 1..20: note = chemically synthesized
  source 1..20: mol_type = other DNA
tcggatccactgaggaggtc

SEQ ID NO: 58631 - DNA, 20 bp, synthetic construct
  misc_feature 1..20: note = chemically synthesized
  source 1..20: mol_type = other DNA
tggtggcaggtacctgtaat

SEQ ID NO: 58632 - DNA, 20 bp, synthetic construct
  misc_feature 1..20: note = chemically synthesized
  source 1..20: mol_type = other DNA
tgtgctccttatcttccacc

SEQ ID NO: 58633 - DNA, 20 bp, synthetic construct
  misc_feature 1..20: note = chemically synthesized
  source 1..20: mol_type = other DNA
catcatcgctgaactcctac

SEQ ID NO: 58634 - DNA, 20 bp, synthetic construct
  misc_feature 1..20: note = chemically synthesized
  source 1..20: mol_type = other DNA
gtgacctcctctctctgggc

SEQ ID NO: 58635 - DNA, 20 bp, synthetic construct
  misc_feature 1..20: note = chemically synthesized
  source 1..20: mol_type = other DNA
agtttctcatgactaaaaga

SEQ ID NO: 58636 - DNA, 20 bp, synthetic construct
  misc_feature 1..20: note = chemically synthesized
  source 1..20: mol_type = other DNA
ggattggtctaaaaattatt

SEQ ID NO: 58637 - DNA, 20 bp, synthetic construct
  misc_feature 1..20: note = chemically synthesized
  source 1..20: mol_type = other DNA
aaaaaatattttcattctaa

SEQ ID NO: 58638 - DNA, 20 bp, synthetic construct
  misc_feature 1..20: note = chemically synthesized
  source 1..20: mol_type = other DNA
accagagaagaaacatcctc

SEQ ID NO: 58639 - DNA, 20 bp, synthetic construct
  misc_feature 1..20: note = chemically synthesized
  source 1..20: mol_type = other DNA
ggttcaggtggtcatacagc

SEQ ID NO: 58640 - DNA, 20 bp, synthetic construct
  misc_feature 1..20: note = chemically synthesized
  source 1..20: mol_type = other DNA
gtactcactatttccagaac

SEQ ID NO: 58641 - DNA, 20 bp, synthetic construct
  misc_feature 1..20: note = chemically synthesized
  source 1..20: mol_type = other DNA
ttcccctctgccccaggagc

SEQ ID NO: 58642 - DNA, 20 bp, synthetic construct
  misc_feature 1..20: note = chemically synthesized
  source 1..20: mol_type = other DNA
aaaactgcaagtgatccccc

SEQ ID NO: 58643 - DNA, 20 bp, synthetic construct
  misc_feature 1..20: note = chemically synthesized
  source 1..20: mol_type = other DNA
ctgctgccactgagccgtag

SEQ ID NO: 58644 - DNA, 20 bp, synthetic construct
  misc_feature 1..20: note = chemically synthesized
  source 1..20: mol_type = other DNA
gacgattgtcacctcccttt

SEQ ID NO: 58645 - DNA, 20 bp, synthetic construct
  misc_feature 1..20: note = chemically synthesized
  source 1..20: mol_type = other DNA
ccacagctagtgagaggaag

SEQ ID NO: 58646 - DNA, 20 bp, synthetic construct
  misc_feature 1..20: note = chemically synthesized
  source 1..20: mol_type = other DNA
ctagtggtctcgccccggga

SEQ ID NO: 58647 - DNA, 20 bp, synthetic construct
  misc_feature 1..20: note = chemically synthesized
  source 1..20: mol_type = other DNA
ggccctccaccctccgctgc

SEQ ID NO: 58648 - DNA, 20 bp, synthetic construct
  misc_feature 1..20: note = chemically synthesized
  source 1..20: mol_type = other DNA
ggaacccactataatggcaa

SEQ ID NO: 58649 - DNA, 20 bp, synthetic construct
  misc_feature 1..20: note = chemically synthesized
  source 1..20: mol_type = other DNA
gtggctgtggttccgtgctc

SEQ ID NO: 58650 - DNA, 20 bp, synthetic construct
  misc_feature 1..20: note = chemically synthesized
  source 1..20: mol_type = other DNA
gcggaaaccttctagggtgt

SEQ ID NO: 58651 - DNA, 20 bp, synthetic construct
  misc_feature 1..20: note = chemically synthesized
  source 1..20: mol_type = other DNA
gagccccatcggacgatcct

SEQ ID NO: 58652 - DNA, 20 bp, synthetic construct
  misc_feature 1..20: note = chemically synthesized
  source 1..20: mol_type = other DNA
ggaacccccggactggagga

SEQ ID NO: 58653 - DNA, 20 bp, synthetic construct
  misc_feature 1..20: note = chemically synthesized
  source 1..20: mol_type = other DNA
cctcgccctccccaaacagc

SEQ ID NO: 58654 - DNA, 20 bp, synthetic construct
  misc_feature 1..20: note = chemically synthesized
  source 1..20: mol_type = other DNA
ttctgccgggcccacctttt

SEQ ID NO: 58655 - DNA, 20 bp, synthetic construct
  misc_feature 1..20: note = chemically synthesized
  source 1..20: mol_type = other DNA
taccaactagctgctccttg

SEQ ID NO: 58656 - DNA, 20 bp, synthetic construct
  misc_feature 1..20: note = chemically synthesized
  source 1..20: mol_type = other DNA
aactagctgctccttgaaga

SEQ ID NO: 58657 - DNA, 20 bp, synthetic construct
  misc_feature 1..20: note = chemically synthesized
  source 1..20: mol_type = other DNA
agctgctccttgaagagatt

SEQ ID NO: 58658 - DNA, 20 bp, synthetic construct
  misc_feature 1..20: note = chemically synthesized
  source 1..20: mol_type = other DNA
gtccagcctacatgcatttc

SEQ ID NO: 58659 - DNA, 20 bp, synthetic construct
  misc_feature 1..20: note = chemically synthesized
  source 1..20: mol_type = other DNA
atttcaagggatttatacta

SEQ ID NO: 58660 - DNA, 20 bp, synthetic construct
  misc_feature 1..20: note = chemically synthesized
  source 1..20: mol_type = other DNA
gggatttatactacaaagat

SEQ ID NO: 58661 - DNA, 20 bp, synthetic construct
  misc_feature 1..20: note = chemically synthesized
  source 1..20: mol_type = other DNA
atactacaaagattcaggtt

SEQ ID NO: 58662 - DNA, 20 bp, synthetic construct
  misc_feature 1..20: note = chemically synthesized
  source 1..20: mol_type = other DNA
aattctatggtaggcacaag

SEQ ID NO: 58663 - DNA, 20 bp, synthetic construct
  misc_feature 1..20: note = chemically synthesized
  source 1..20: mol_type = other DNA
aggcacaagctcagctttcc

SEQ ID NO: 58664 - DNA, 20 bp, synthetic construct
  misc_feature 1..20: note = chemically synthesized
  source 1..20: mol_type = other DNA
tttccagaagattcaatttg

SEQ ID NO: 58665 - DNA, 20 bp, synthetic construct
  misc_feature 1..20: note = chemically synthesized
  source 1..20: mol_type = other DNA
ggggaaagagagctcctggc

SEQ ID NO: 58666 - DNA, 20 bp, synthetic construct
  misc_feature 1..20: note = chemically synthesized
  source 1..20: mol_type = other DNA
attgtacatgtggcatgaca

SEQ ID NO: 58667 - DNA, 20 bp, synthetic construct
  misc_feature 1..20: note = chemically synthesized
  source 1..20: mol_type = other DNA
atcctcccttgcagatgcac

SEQ ID NO: 58668 - DNA, 20 bp, synthetic construct
  misc_feature 1..20: note = chemically synthesized
  source 1..20: mol_type = other DNA
caaagttgatgctctttcca

SEQ ID NO: 58669 - DNA, 20 bp, synthetic construct
  misc_feature 1..20: note = chemically synthesized
  source 1..20: mol_type = other DNA
cgcagcacagagtaggagct

SEQ ID NO: 58670 - DNA, 20 bp, synthetic construct
  misc_feature 1..20: note = chemically synthesized
  source 1..20: mol_type = other DNA
taattggaattgtatttgca

SEQ ID NO: 58671 - DNA, 20 bp, synthetic construct
  misc_feature 1..20: note = chemically synthesized
  source 1..20: mol_type = other DNA
tgtatttgcaatgtgctttt

SEQ ID NO: 58672 - DNA, 22 bp, synthetic construct
  misc_feature 1..22: note = chemically synthesized
  source 1..22: mol_type = other DNA
gctcccatctattcttgctcca

SEQ ID NO: 58673 - DNA, 22 bp, synthetic construct
  misc_feature 1..22: note = chemically synthesized
  source 1..22: mol_type = other DNA
ccatctattcttgctccagggg

SEQ ID NO: 58674 - DNA, 22 bp, synthetic construct
  misc_feature 1..22: note = chemically synthesized
  source 1..22: mol_type = other DNA
ttcttgctccaggggaggcctt

SEQ ID NO: 58675 - DNA, 22 bp, synthetic construct
  misc_feature 1..22: note = chemically synthesized
  source 1..22: mol_type = other DNA
ttgctccaggggaggcctttga

SEQ ID NO: 58676 - DNA, 22 bp, synthetic construct
  misc_feature 1..22: note = chemically synthesized
  source 1..22: mol_type = other DNA
gctccaggggaggcctttgatg

SEQ ID NO: 58677 - DNA, 22 bp, synthetic construct
  misc_feature 1..22: note = chemically synthesized
  source 1..22: mol_type = other DNA
ctccaggggaggcctttgatga

SEQ ID NO: 58678 - DNA, 22 bp, synthetic construct
  misc_feature 1..22: note = chemically synthesized
  source 1..22: mol_type = other DNA
caggggaggcctttgatgagga

SEQ ID NO: 58679 - DNA, 22 bp, synthetic construct
  misc_feature 1..22: note = chemically synthesized
  source 1..22: mol_type = other DNA
tgatgaggaagctgccaaaagc

SEQ ID NO: 58680 - DNA, 22 bp, synthetic construct
  misc_feature 1..22: note = chemically synthesized
  source 1..22: mol_type = other DNA
gatgaggaagctgccaaaagca

SEQ ID NO: 58681 - DNA, 22 bp, synthetic construct
  misc_feature 1..22: note = chemically synthesized
  source 1..22: mol_type = other DNA
atgaggaagctgccaaaagcac

SEQ ID NO: 58682 - DNA, 22 bp, synthetic construct
  misc_feature 1..22: note = chemically synthesized
  source 1..22: mol_type = other DNA
ccaaaagcacattgcaaataca

SEQ ID NO: 58683 - DNA, 22 bp, synthetic construct
  misc_feature 1..22: note = chemically synthesized
  source 1..22: mol_type = other DNA
caaatacaattccaattacagg

SEQ ID NO: 58684 - DNA, 22 bp, synthetic construct
  misc_feature 1..22: note = chemically synthesized
  source 1..22: mol_type = other DNA
caattacaggcaacaggaagga

SEQ ID NO: 58685 - DNA, 22 bp, synthetic construct
  misc_feature 1..22: note = chemically synthesized
  source 1..22: mol_type = other DNA
caggcaacaggaaggagaacca

SEQ ID NO: 58686 - DNA, 22 bp, synthetic construct
  misc_feature 1..22: note = chemically synthesized
  source 1..22: mol_type = other DNA
tgccacctctgtcagcaaacca

SEQ ID NO: 58687 - DNA, 22 bp, synthetic construct
  misc_feature 1..22: note = chemically synthesized
  source 1..22: mol_type = other DNA
ccacctctgtcagcaaaccatg

SEQ ID NO: 58688 - DNA, 22 bp, synthetic construct
  misc_feature 1..22: note = chemically synthesized
  source 1..22: mol_type = other DNA
tgtcagcaaaccatgagctcct

SEQ ID NO: 58689 - DNA, 22 bp, synthetic construct
  misc_feature 1..22: note = chemically synthesized
  source 1..22: mol_type = other DNA
tcagcaaaccatgagctcctac

SEQ ID NO: 58690 - DNA, 22 bp, synthetic construct
  misc_feature 1..22: note = chemically synthesized
  source 1..22: mol_type = other DNA
ctactctgtgctgcgatggcgg

SEQ ID NO: 58691 - DNA, 22 bp, synthetic construct
  misc_feature 1..22: note = chemically synthesized
  source 1..22: mol_type = other DNA
ctctgtgctgcgatggcgggct

SEQ ID NO: 58692 - DNA, 22 bp, synthetic construct
  misc_feature 1..22: note = chemically synthesized
  source 1..22: mol_type = other DNA
tgtgctgcgatggcgggctcga

SEQ ID NO: 58693 - DNA, 22 bp, synthetic construct
  misc_feature 1..22: note = chemically synthesized
  source 1..22: mol_type = other DNA
tgctgcgatggcgggctcgatg

SEQ ID NO: 58694 - DNA, 22 bp, synthetic construct
  misc_feature 1..22: note = chemically synthesized
  source 1..22: mol_type = other DNA
cgatggcgggctcgatggggat

SEQ ID NO: 58695 - DNA, 22 bp, synthetic construct
  misc_feature 1..22: note = chemically synthesized
  source 1..22: mol_type = other DNA
gatggggataactctgacctta

SEQ ID NO: 58696 - DNA, 22 bp, synthetic construct
  misc_feature 1..22: note = chemically synthesized
  source 1..22: mol_type = other DNA
tgaccttacctcatggagtcac

SEQ ID NO: 58697 - DNA, 22 bp, synthetic construct
  misc_feature 1..22: note = chemically synthesized
  source 1..22: mol_type = other DNA
accttacctcatggagtcactg

SEQ ID NO: 58698 - DNA, 22 bp, synthetic construct
  misc_feature 1..22: note = chemically synthesized
  source 1..22: mol_type = other DNA
acctcatggagtcactgtcaac

SEQ ID NO: 58699 - DNA, 22 bp, synthetic construct
  misc_feature 1..22: note = chemically synthesized
  source 1..22: mol_type = other DNA
cctcatggagtcactgtcaacc

SEQ ID NO: 58700 - DNA, 22 bp, synthetic construct
  misc_feature 1..22: note = chemically synthesized
  source 1..22: mol_type = other DNA
atggagtcactgtcaacccact

SEQ ID NO: 58701 - DNA, 22 bp, synthetic construct
  misc_feature 1..22: note = chemically synthesized
  source 1..22: mol_type = other DNA
tcaacccactggttgcactgtc

SEQ ID NO: 58702 - DNA, 22 bp, synthetic construct
  misc_feature 1..22: note = chemically synthesized
  source 1..22: mol_type = other DNA
gttgcactgtctttgtgcactg

SEQ ID NO: 58703 - DNA, 22 bp, synthetic construct
  misc_feature 1..22: note = chemically synthesized
  source 1..22: mol_type = other DNA
cactgtctttgtgcactggctc

SEQ ID NO: 58704 - DNA, 22 bp, synthetic construct
  misc_feature 1..22: note = chemically synthesized
  source 1..22: mol_type = other DNA
tctttgtgcactggctctctgg

SEQ ID NO: 58705 - DNA, 22 bp, synthetic construct
  misc_feature 1..22: note = chemically synthesized
  source 1..22: mol_type = other DNA
tgtgcactggctctctggagtg

SEQ ID NO: 58706 - DNA, 22 bp, synthetic construct
  misc_feature 1..22: note = chemically synthesized
  source 1..22: mol_type = other DNA
gtgcactggctctctggagtga

SEQ ID NO: 58707 - DNA, 22 bp, synthetic construct
  misc_feature 1..22: note = chemically synthesized
  source 1..22: mol_type = other DNA
tgcactggctctctggagtgag

SEQ ID NO: 58708 - DNA, 22 bp, synthetic construct
  misc_feature 1..22: note = chemically synthesized
  source 1..22: mol_type = other DNA
gctctctggagtgaggtctttg

SEQ ID NO: 58709 - DNA, 22 bp, synthetic construct
  misc_feature 1..22: note = chemically synthesized
  source 1..22: mol_type = other DNA
tctggagtgaggtctttgcaaa

SEQ ID NO: 58710 - DNA, 22 bp, synthetic construct
  misc_feature 1..22: note = chemically synthesized
  source 1..22: mol_type = other DNA
tggagtgaggtctttgcaaaca

SEQ ID NO: 58711 - DNA, 22 bp, synthetic construct
  misc_feature 1..22: note = chemically synthesized
  source 1..22: mol_type = other DNA
gagtgaggtctttgcaaacaaa

SEQ ID NO: 58712 - DNA, 22 bp, synthetic construct
  misc_feature 1..22: note = chemically synthesized
  source 1..22: mol_type = other DNA
tgcaaacaaagtggaaagagca

SEQ ID NO: 58713 - DNA, 22 bp, synthetic construct
  misc_feature 1..22: note = chemically synthesized
  source 1..22: mol_type = other DNA
gcaaacaaagtggaaagagcat

SEQ ID NO: 58714 - DNA, 22 bp, synthetic construct
  misc_feature 1..22: note = chemically synthesized
  source 1..22: mol_type = other DNA
caaacaaagtggaaagagcatc

SEQ ID NO: 58715 - DNA, 22 bp, synthetic construct
  misc_feature 1..22: note = chemically synthesized
  source 1..22: mol_type = other DNA
tggactccagcacctagattca

SEQ ID NO: 58716 - DNA, 22 bp, synthetic construct
  misc_feature 1..22: note = chemically synthesized
  source 1..22: mol_type = other DNA
ggactccagcacctagattcag

SEQ ID NO: 58717 - DNA, 22 bp, synthetic construct
  misc_feature 1..22: note = chemically synthesized
  source 1..22: mol_type = other DNA
gactccagcacctagattcaga

SEQ ID NO: 58718 - DNA, 22 bp, synthetic construct
  misc_feature 1..22: note = chemically synthesized
  source 1..22: mol_type = other DNA
cagcacctagattcagagcagg

SEQ ID NO: 58719 - DNA, 22 bp, synthetic construct
  misc_feature 1..22: note = chemically synthesized
  source 1..22: mol_type = other DNA
gattcagagcaggccatttcac

SEQ ID NO: 58720 - DNA, 22 bp, synthetic construct
  misc_feature 1..22: note = chemically synthesized
  source 1..22: mol_type = other DNA
agagcaggccatttcactcgga

SEQ ID NO: 58721 - DNA, 22 bp, synthetic construct
  misc_feature 1..22: note = chemically synthesized
  source 1..22: mol_type = other DNA
cactcggaatctgctgtgcatc

SEQ ID NO: 58722 - DNA, 22 bp, synthetic construct
  misc_feature 1..22: note = chemically synthesized
  source 1..22: mol_type = other DNA
actcggaatctgctgtgcatct

SEQ ID NO: 58723 - DNA, 22 bp, synthetic construct
  misc_feature 1..22: note = chemically synthesized
  source 1..22: mol_type = other DNA
ggaatctgctgtgcatctgcaa

SEQ ID NO: 58724 - DNA, 22 bp, synthetic construct
  misc_feature 1..22: note = chemically synthesized
  source 1..22: mol_type = other DNA
ctgtgcatctgcaagggaggat

SEQ ID NO: 58725 - DNA, 22 bp, synthetic construct
  misc_feature 1..22: note = chemically synthesized
  source 1..22: mol_type = other DNA
tgcatctgcaagggaggatcat

SEQ ID NO: 58726 - DNA, 22 bp, synthetic construct
  misc_feature 1..22: note = chemically synthesized
  source 1..22: mol_type = other DNA
caagggaggatcataaattcgc

SEQ ID NO: 58727 - DNA, 22 bp, synthetic construct
  misc_feature 1..22: note = chemically synthesized
  source 1..22: mol_type = other DNA
gcctttgtttcttcccagtatc

SEQ ID NO: 58728 - DNA, 22 bp, synthetic construct
  misc_feature 1..22: note = chemically synthesized
  source 1..22: mol_type = other DNA
tgtttcttcccagtatcgacag

SEQ ID NO: 58729 - DNA, 22 bp, synthetic construct
  misc_feature 1..22: note = chemically synthesized
  source 1..22: mol_type = other DNA
gtttcttcccagtatcgacagc

SEQ ID NO: 58730 - DNA, 22 bp, synthetic construct
  misc_feature 1..22: note = chemically synthesized
  source 1..22: mol_type = other DNA
tttcttcccagtatcgacagcc

SEQ ID NO: 58731 - DNA, 22 bp, synthetic construct
  misc_feature 1..22: note = chemically synthesized
  source 1..22: mol_type = other DNA
cttcccagtatcgacagccctt

SEQ ID NO: 58732 - DNA, 22 bp, synthetic construct
  misc_feature 1..22: note = chemically synthesized
  source 1..22: mol_type = other DNA
ttcccagtatcgacagcccttc

SEQ ID NO: 58733 - DNA, 22 bp, synthetic construct
  misc_feature 1..22: note = chemically synthesized
  source 1..22: mol_type = other DNA
cccagtatcgacagcccttcca

SEQ ID NO: 58734 - DNA, 22 bp, synthetic construct
  misc_feature 1..22: note = chemically synthesized
  source 1..22: mol_type = other DNA
ccagtatcgacagcccttccag

SEQ ID NO: 58735 - DNA, 22 bp, synthetic construct
  misc_feature 1..22: note = chemically synthesized
  source 1..22: mol_type = other DNA
ccagaaagagcaagcctcatgt

SEQ ID NO: 58736 - DNA, 22 bp, synthetic construct
  misc_feature 1..22: note = chemically synthesized
  source 1..22: mol_type = other DNA
cagaaagagcaagcctcatgtc

SEQ ID NO: 58737 - DNA, 22 bp, synthetic construct
  misc_feature 1..22: note = chemically synthesized
  source 1..22: mol_type = other DNA
atgtcatgccacatgtacaatc

SEQ ID NO: 58738 - DNA, 22 bp, synthetic construct
  misc_feature 1..22: note = chemically synthesized
  source 1..22: mol_type = other DNA
aggccaggagctctctttcccc

SEQ ID NO: 58739 - DNA, 22 bp, synthetic construct
  misc_feature 1..22: note = chemically synthesized
  source 1..22: mol_type = other DNA
tctttccccttttcatcctcct

SEQ ID NO: 58740 - DNA, 22 bp, synthetic construct
  misc_feature 1..22: note = chemically synthesized
  source 1..22: mol_type = other DNA
tttccccttttcatcctcctgc

SEQ ID NO: 58741 - DNA, 22 bp, synthetic construct
  misc_feature 1..22: note = chemically synthesized
  source 1..22: mol_type = other DNA
tccccttttcatcctcctgcct

SEQ ID NO: 58742 - DNA, 22 bp, synthetic construct
  misc_feature 1..22: note = chemically synthesized
  source 1..22: mol_type = other DNA
ccccttttcatcctcctgcctg

SEQ ID NO: 58743 - DNA, 22 bp, synthetic construct
  misc_feature 1..22: note = chemically synthesized
  source 1..22: mol_type = other DNA
cccttttcatcctcctgcctgg

SEQ ID NO: 58744 - DNA, 22 bp, synthetic construct
  misc_feature 1..22: note = chemically synthesized
  source 1..22: mol_type = other DNA
ttcatcctcctgcctggtacac

SEQ ID NO: 58745 - DNA, 22 bp, synthetic construct
  misc_feature 1..22: note = chemically synthesized
  source 1..22: mol_type = other DNA
tcatcctcctgcctggtacaca

SEQ ID NO: 58746 - DNA, 22 bp, synthetic construct
  misc_feature 1..22: note = chemically synthesized
  source 1..22: mol_type = other DNA
catcctcctgcctggtacacaa

SEQ ID NO: 58747 - DNA, 22 bp, synthetic construct
  misc_feature 1..22: note = chemically synthesized
  source 1..22: mol_type = other DNA
atcctcctgcctggtacacaat

SEQ ID NO: 58748 - DNA, 22 bp, synthetic construct
  misc_feature 1..22: note = chemically synthesized
  source 1..22: mol_type = other DNA
ctgcctggtacacaataggtgt

SEQ ID NO: 58749 - DNA, 22 bp, synthetic construct
  misc_feature 1..22: note = chemically synthesized
  source 1..22: mol_type = other DNA
cctggtacacaataggtgttta

SEQ ID NO: 58750 - DNA, 22 bp, synthetic construct
  misc_feature 1..22: note = chemically synthesized
  source 1..22: mol_type = other DNA
gtacacaataggtgtttactgg

SEQ ID NO: 58751 - DNA, 22 bp, synthetic construct
  misc_feature 1..22: note = chemically synthesized
  source 1..22: mol_type = other DNA
actggatgcttgtccagttgat

SEQ ID NO: 58752 - DNA, 22 bp, synthetic construct
  misc_feature 1..22: note = chemically synthesized
  source 1..22: mol_type = other DNA
ctggatgcttgtccagttgatt

SEQ ID NO: 58753 - DNA, 22 bp, synthetic construct
  misc_feature 1..22: note = chemically synthesized
  source 1..22: mol_type = other DNA
gatgcttgtccagttgatttct

SEQ ID NO: 58754 - DNA, 22 bp, synthetic construct
  misc_feature 1..22: note = chemically synthesized
  source 1..22: mol_type = other DNA
gtccagttgatttcttgaacat

SEQ ID NO: 58755 - DNA, 22 bp, synthetic construct
  misc_feature 1..22: note = chemically synthesized
  source 1..22: mol_type = other DNA
tccagttgatttcttgaacatg

SEQ ID NO: 58756 - DNA, 22 bp, synthetic construct
  misc_feature 1..22: note = chemically synthesized
  source 1..22: mol_type = other DNA
atttcttgaacatggtgtgtaa

SEQ ID NO: 58757 - DNA, 22 bp, synthetic construct
  misc_feature 1..22: note = chemically synthesized
  source 1..22: mol_type = other DNA
cttgaacatggtgtgtaaaagg

SEQ ID NO: 58758 - DNA, 22 bp, synthetic construct
  misc_feature 1..22: note = chemically synthesized
  source 1..22: mol_type = other DNA
ttgaacatggtgtgtaaaagga

SEQ ID NO: 58759 - DNA, 22 bp, synthetic construct
  misc_feature 1..22: note = chemically synthesized
  source 1..22: mol_type = other DNA
gaacatggtgtgtaaaaggaat

SEQ ID NO: 58760 - DNA, 22 bp, synthetic construct
  misc_feature 1..22: note = chemically synthesized
  source 1..22: mol_type = other DNA
aacatggtgtgtaaaaggaatc

SEQ ID NO: 58761 - DNA, 22 bp, synthetic construct
  misc_feature 1..22: note = chemically synthesized
  source 1..22: mol_type = other DNA
tgcaaattgaatcttctggaaa

SEQ ID NO: 58762 - DNA, 22 bp, synthetic construct
  misc_feature 1..22: note = chemically synthesized
  source 1..22: mol_type = other DNA
gcaaattgaatcttctggaaag

SEQ ID NO: 58763 - DNA, 22 bp, synthetic construct
  misc_feature 1..22: note = chemically synthesized
  source 1..22: mol_type = other DNA
caaattgaatcttctggaaagc

SEQ ID NO: 58764 - DNA, 22 bp, synthetic construct
  misc_feature 1..22: note = chemically synthesized
  source 1..22: mol_type = other DNA
aatcttctggaaagctgagctt

SEQ ID NO: 58765 - DNA, 22 bp, synthetic construct
  misc_feature 1..22: note = chemically synthesized
  source 1..22: mol_type = other DNA
ctggaaagctgagcttgtgcct

SEQ ID NO: 58766 - DNA, 22 bp, synthetic construct
  misc_feature 1..22: note = chemically synthesized
  source 1..22: mol_type = other DNA
tggaaagctgagcttgtgccta

SEQ ID NO: 58767 - DNA, 22 bp, synthetic construct
  misc_feature 1..22: note = chemically synthesized
  source 1..22: mol_type = other DNA
gaaagctgagcttgtgcctacc

SEQ ID NO: 58768 - DNA, 22 bp, synthetic construct
  misc_feature 1..22: note = chemically synthesized
  source 1..22: mol_type = other DNA
agcttgtgcctaccatagaatt

SEQ ID NO: 58769 - DNA, 22 bp, synthetic construct
  misc_feature 1..22: note = chemically synthesized
  source 1..22: mol_type = other DNA
gtgcctaccatagaattctgaa

SEQ ID NO: 58770 - DNA, 22 bp, synthetic construct
  misc_feature 1..22: note = chemically synthesized
  source 1..22: mol_type = other DNA
tgcctaccatagaattctgaat

SEQ ID NO: 58771 - DNA, 22 bp, synthetic construct
  misc_feature 1..22: note = chemically synthesized
  source 1..22: mol_type = other DNA
ccatagaattctgaatgtacct

SEQ ID NO: 58772 - DNA, 22 bp, synthetic construct
  misc_feature 1..22: note = chemically synthesized
  source 1..22: mol_type = other DNA
tgaatgtacctatatgacgtct

SEQ ID NO: 58773 - DNA, 22 bp, synthetic construct
  misc_feature 1..22: note = chemically synthesized
  source 1..22: mol_type = other DNA
aatgtacctatatgacgtcttt

SEQ ID NO: 58774 - DNA, 22 bp, synthetic construct
  misc_feature 1..22: note = chemically synthesized
  source 1..22: mol_type = other DNA
tatgacgtctttgcaaacttaa

SEQ ID NO: 58775 - DNA, 22 bp, synthetic construct
  misc_feature 1..22: note = chemically synthesized
  source 1..22: mol_type = other DNA
tgcaaacttaaaacctgaatct

SEQ ID NO: 58776 - DNA, 22 bp, synthetic construct
  misc_feature 1..22: note = chemically synthesized
  source 1..22: mol_type = other DNA
gcaaacttaaaacctgaatctt

SEQ ID NO: 58777 - DNA, 22 bp, synthetic construct
  misc_feature 1..22: note = chemically synthesized
  source 1..22: mol_type = other DNA
caaacttaaaacctgaatcttt

SEQ ID NO: 58778 - DNA, 22 bp, synthetic construct
  misc_feature 1..22: note = chemically synthesized
  source 1..22: mol_type = other DNA
aaaacctgaatctttgtagtat

SEQ ID NO: 58779 - DNA, 22 bp, synthetic construct
  misc_feature 1..22: note = chemically synthesized
  source 1..22: mol_type = other DNA
aaacctgaatctttgtagtata

SEQ ID NO: 58780 - DNA, 22 bp, synthetic construct
  misc_feature 1..22: note = chemically synthesized
  source 1..22: mol_type = other DNA
aatctttgtagtataaatccct

SEQ ID NO: 58781 - DNA, 22 bp, synthetic construct
  misc_feature 1..22: note = chemically synthesized
  source 1..22: mol_type = other DNA
tgtagtataaatcccttgaaat

SEQ ID NO: 58782 - DNA, 22 bp, synthetic construct
  misc_feature 1..22: note = chemically synthesized
  source 1..22: mol_type = other DNA
gtagtataaatcccttgaaatg

SEQ ID NO: 58783 - DNA, 22 bp, synthetic construct
  misc_feature 1..22: note = chemically synthesized
  source 1..22: mol_type = other DNA
tagtataaatcccttgaaatgc

SEQ ID NO: 58784 - DNA, 22 bp, synthetic construct
  misc_feature 1..22: note = chemically synthesized
  source 1..22: mol_type = other DNA
gaaatgcatgtaggctggacat

SEQ ID NO: 58785 - DNA, 22 bp, synthetic construct
  misc_feature 1..22: note = chemically synthesized
  source 1..22: mol_type = other DNA
aaatgcatgtaggctggacatc

SEQ ID NO: 58786 - DNA, 22 bp, synthetic construct
  misc_feature 1..22: note = chemically synthesized
  source 1..22: mol_type = other DNA
gacatcaaaagcaagcaatctc

SEQ ID NO: 58787 - DNA, 22 bp, synthetic construct
  misc_feature 1..22: note = chemically synthesized
  source 1..22: mol_type = other DNA
ttcaaggagcagctagttggta

SEQ ID NO: 58788 - DNA, 22 bp, synthetic construct
  misc_feature 1..22: note = chemically synthesized
  source 1..22: mol_type = other DNA
caaggagcagctagttggtaag

SEQ ID NO: 58789 - DNA, 22 bp, synthetic construct
  misc_feature 1..22: note = chemically synthesized
  source 1..22: mol_type = other DNA
aaggagcagctagttggtaagg

SEQ ID NO: 58790 - DNA, 22 bp, synthetic construct
  misc_feature 1..22: note = chemically synthesized
  source 1..22: mol_type = other DNA
gttggtaaggtcagtgtgcagg

SEQ ID NO: 58791 - DNA, 22 bp, synthetic construct
  misc_feature 1..22: note = chemically synthesized
  source 1..22: mol_type = other DNA
gtaaggtcagtgtgcagggtgc

SEQ ID NO: 58792 - DNA, 22 bp, synthetic construct
  misc_feature 1..22: note = chemically synthesized
  source 1..22: mol_type = other DNA
agtttagaaggctgccaggtta

SEQ ID NO: 58793 - DNA, 22 bp, synthetic construct
  misc_feature 1..22: note = chemically synthesized
  source 1..22: mol_type = other DNA
agaaggctgccaggttaaggcc

SEQ ID NO: 58794 - DNA, 22 bp, synthetic construct
  misc_feature 1..22: note = chemically synthesized
  source 1..22: mol_type = other DNA
gaaggctgccaggttaaggcca

SEQ ID NO: 58795 - DNA, 22 bp, synthetic construct
  misc_feature 1..22: note = chemically synthesized
  source 1..22: mol_type = other DNA
ccaggttaaggccagtggaaag

SEQ ID NO: 58796 - DNA, 22 bp, synthetic construct
  misc_feature 1..22: note = chemically synthesized
  source 1..22: mol_type = other DNA
aggccagtggaaagaattcggt

SEQ ID NO: 58797 - DNA, 22 bp, synthetic construct
  misc_feature 1..22: note = chemically synthesized
  source 1..22: mol_type = other DNA
ggtgggcagcgaggagtccaca

SEQ ID NO: 58798 - DNA, 22 bp, synthetic construct
  misc_feature 1..22: note = chemically synthesized
  source 1..22: mol_type = other DNA
attcagaagtctcactggtcag

SEQ ID NO: 58799 - DNA, 22 bp, synthetic construct
  misc_feature 1..22: note = chemically synthesized
  source 1..22: mol_type = other DNA
agaagtctcactggtcagcagg

SEQ ID NO: 58800 - DNA, 22 bp, synthetic construct
  misc_feature 1..22: note = chemically synthesized
  source 1..22: mol_type = other DNA
actggtcagcaggagacaaggt

SEQ ID NO: 58801 - DNA, 22 bp, synthetic construct
  misc_feature 1..22: note = chemically synthesized
  source 1..22: mol_type = other DNA
gtcagcaggagacaaggtggac

SEQ ID NO: 58802 - DNA, 22 bp, synthetic construct
  misc_feature 1..22: note = chemically synthesized
  source 1..22: mol_type = other DNA
aaaaggtgggcccggcagaact

SEQ ID NO: 58803 - DNA, 22 bp, synthetic construct
  misc_feature 1..22: note = chemically synthesized
  source 1..22: mol_type = other DNA
ggagtctggcatcccacgcagg

SEQ ID NO: 58804 - DNA, 22 bp, synthetic construct
  misc_feature 1..22: note = chemically synthesized
  source 1..22: mol_type = other DNA
gagtctggcatcccacgcaggg

SEQ ID NO: 58805 - DNA, 22 bp, synthetic construct
  misc_feature 1..22: note = chemically synthesized
  source 1..22: mol_type = other DNA
gcatcccacgcagggtgagagg

SEQ ID NO: 58806 - DNA, 22 bp, synthetic construct
  misc_feature 1..22: note = chemically synthesized
  source 1..22: mol_type = other DNA
gggcgccggcctgccttccagc

SEQ ID NO: 58807 - DNA, 22 bp, synthetic construct
  misc_feature 1..22: note = chemically synthesized
  source 1..22: mol_type = other DNA
ccttccagcccagttaggattt

SEQ ID NO: 58808 - DNA, 22 bp, synthetic construct
  misc_feature 1..22: note = chemically synthesized
  source 1..22: mol_type = other DNA
ccagcccagttaggatttggga

SEQ ID NO: 58809 - DNA, 22 bp, synthetic construct
  misc_feature 1..22: note = chemically synthesized
  source 1..22: mol_type = other DNA
cagcccagttaggatttgggag

SEQ ID NO: 58810 - DNA, 22 bp, synthetic construct
  misc_feature 1..22: note = chemically synthesized
  source 1..22: mol_type = other DNA
ggatttgggagttttttcttcc

SEQ ID NO: 58811 - DNA, 22 bp, synthetic construct
  misc_feature 1..22: note = chemically synthesized
  source 1..22: mol_type = other DNA
gggagttttttcttccctctgc

SEQ ID NO: 58812 - DNA, 22 bp, synthetic construct
  misc_feature 1..22: note = chemically synthesized
  source 1..22: mol_type = other DNA
ggagttttttcttccctctgcg

SEQ ID NO: 58813 - DNA, 22 bp, synthetic construct
  misc_feature 1..22: note = chemically synthesized
  source 1..22: mol_type = other DNA
tttcttccctctgcgcgtaatc

SEQ ID NO: 58814 - DNA, 22 bp, synthetic construct
  misc_feature 1..22: note = chemically synthesized
  source 1..22: mol_type = other DNA
ttcttccctctgcgcgtaatct

SEQ ID NO: 58815 - DNA, 22 bp, synthetic construct
  misc_feature 1..22: note = chemically synthesized
  source 1..22: mol_type = other DNA
tcttccctctgcgcgtaatctg

SEQ ID NO: 58816 - DNA, 22 bp, synthetic construct
  misc_feature 1..22: note = chemically synthesized
  source 1..22: mol_type = other DNA
cttccctctgcgcgtaatctga

SEQ ID NO: 58817 - DNA, 22 bp, synthetic construct
  misc_feature 1..22: note = chemically synthesized
  source 1..22: mol_type = other DNA
ttccctctgcgcgtaatctgac

SEQ ID NO: 58818 - DNA, 22 bp, synthetic construct
  misc_feature 1..22: note = chemically synthesized
  source 1..22: mol_type = other DNA
ccctctgcgcgtaatctgacgc

SEQ ID NO: 58819 - DNA, 22 bp, synthetic construct
  misc_feature 1..22: note = chemically synthesized
  source 1..22: mol_type = other DNA
cctctgcgcgtaatctgacgct

SEQ ID NO: 58820 - DNA, 22 bp, synthetic construct
  misc_feature 1..22: note = chemically synthesized
  source 1..22: mol_type = other DNA
tgcgcgtaatctgacgctgttt

SEQ ID NO: 58821 - DNA, 22 bp, synthetic construct
  misc_feature 1..22: note = chemically synthesized
  source 1..22: mol_type = other DNA
cgcgtaatctgacgctgtttgg

SEQ ID NO: 58822 - DNA, 22 bp, synthetic construct
  misc_feature 1..22: note = chemically synthesized
  source 1..22: mol_type = other DNA
acgctgtttggggagggcgagg

SEQ ID NO: 58823 - DNA, 22 bp, synthetic construct
  misc_feature 1..22: note = chemically synthesized
  source 1..22: mol_type = other DNA
tttggggagggcgaggccgaaa

SEQ ID NO: 58824 - DNA, 22 bp, synthetic construct
  misc_feature 1..22: note = chemically synthesized
  source 1..22: mol_type = other DNA
ggggagggcgaggccgaaacct

SEQ ID NO: 58825 - DNA, 22 bp, synthetic construct
  misc_feature 1..22: note = chemically synthesized
  source 1..22: mol_type = other DNA
gggagggcgaggccgaaacctg

SEQ ID NO: 58826 - DNA, 22 bp, synthetic construct
  misc_feature 1..22: note = chemically synthesized
  source 1..22: mol_type = other DNA
atcctccagtccgggggttccg

SEQ ID NO: 58827 - DNA, 22 bp, synthetic construct
  misc_feature 1..22: note = chemically synthesized
  source 1..22: mol_type = other DNA
cagtccgggggttccgttaatg

SEQ ID NO: 58828 - DNA, 22 bp, synthetic construct
  misc_feature 1..22: note = chemically synthesized
  source 1..22: mol_type = other DNA
cgttaatgtttaatcagatagg

SEQ ID NO: 58829 - DNA, 22 bp, synthetic construct
  misc_feature 1..22: note = chemically synthesized
  source 1..22: mol_type = other DNA
atgtttaatcagataggatcgt

SEQ ID NO: 58830 - DNA, 22 bp, synthetic construct
  misc_feature 1..22: note = chemically synthesized
  source 1..22: mol_type = other DNA
aatcagataggatcgtccgatg

SEQ ID NO: 58831 - DNA, 22 bp, synthetic construct
  misc_feature 1..22: note = chemically synthesized
  source 1..22: mol_type = other DNA
atcagataggatcgtccgatgg

SEQ ID NO: 58832 - DNA, 22 bp, synthetic construct
  misc_feature 1..22: note = chemically synthesized
  source 1..22: mol_type = other DNA
tggtggcgtgatctgcgcgccc

SEQ ID NO: 58833 - DNA, 22 bp, synthetic construct
  misc_feature 1..22: note = chemically synthesized
  source 1..22: mol_type = other DNA
gtggcgtgatctgcgcgcccca

SEQ ID NO: 58834 - DNA, 22 bp, synthetic construct
  misc_feature 1..22: note = chemically synthesized
  source 1..22: mol_type = other DNA
cgcgccccaggcgtcaagcacc

SEQ ID NO: 58835 - DNA, 22 bp, synthetic construct
  misc_feature 1..22: note = chemically synthesized
  source 1..22: mol_type = other DNA
gaaggtttccgcagcgacgtcg

SEQ ID NO: 58836 - DNA, 22 bp, synthetic construct
  misc_feature 1..22: note = chemically synthesized
  source 1..22: mol_type = other DNA
ccgcagcgacgtcgaggcgctc

SEQ ID NO: 58837 - DNA, 22 bp, synthetic construct
  misc_feature 1..22: note = chemically synthesized
  source 1..22: mol_type = other DNA
cgcagcgacgtcgaggcgctca

SEQ ID NO: 58838 - DNA, 22 bp, synthetic construct
  misc_feature 1..22: note = chemically synthesized
  source 1..22: mol_type = other DNA
atggttgcaggcgggcgccgcc

SEQ ID NO: 58839 - DNA, 22 bp, synthetic construct
  misc_feature 1..22: note = chemically synthesized
  source 1..22: mol_type = other DNA
caggcgggcgccgccgttcagt

SEQ ID NO: 58840 - DNA, 22 bp, synthetic construct
  misc_feature 1..22: note = chemically synthesized
  source 1..22: mol_type = other DNA
agttcagggtctgagcctggag

SEQ ID NO: 58841 - DNA, 22 bp, synthetic construct
  misc_feature 1..22: note = chemically synthesized
  source 1..22: mol_type = other DNA
agggtctgagcctggaggagtg

SEQ ID NO: 58842 - DNA, 22 bp, synthetic construct
  misc_feature 1..22: note = chemically synthesized
  source 1..22: mol_type = other DNA
agcctggaggagtgagccaggc

SEQ ID NO: 58843 - DNA, 22 bp, synthetic construct
  misc_feature 1..22: note = chemically synthesized
  source 1..22: mol_type = other DNA
gaggagtgagccaggcagtgag

SEQ ID NO: 58844 - DNA, 22 bp, synthetic construct
  misc_feature 1..22: note = chemically synthesized
  source 1..22: mol_type = other DNA
gctcgggcgggccgggacgcgt

SEQ ID NO: 58845 - DNA, 22 bp, synthetic construct
  misc_feature 1..22: note = chemically synthesized
  source 1..22: mol_type = other DNA
gggcgggccgggacgcgtcgtt

SEQ ID NO: 58846 - DNA, 22 bp, synthetic construct
  misc_feature 1..22: note = chemically synthesized
  source 1..22: mol_type = other DNA
cagcagcggctcccagctccca

SEQ ID NO: 58847 - DNA, 22 bp, synthetic construct
  misc_feature 1..22: note = chemically synthesized
  source 1..22: mol_type = other DNA
ccagctcccagccaggattccg

SEQ ID NO: 58848 - DNA, 22 bp, synthetic construct
  misc_feature 1..22: note = chemically synthesized
  source 1..22: mol_type = other DNA
ccagccaggattccgcgcgccc

SEQ ID NO: 58849 - DNA, 22 bp, synthetic construct
  misc_feature 1..22: note = chemically synthesized
  source 1..22: mol_type = other DNA
cgcgcgccccttcacgcgccct

SEQ ID NO: 58850 - DNA, 22 bp, synthetic construct
  misc_feature 1..22: note = chemically synthesized
  source 1..22: mol_type = other DNA
cacgcgccctgctcctgaactt

SEQ ID NO: 58851 - DNA, 22 bp, synthetic construct
  misc_feature 1..22: note = chemically synthesized
  source 1..22: mol_type = other DNA
acgcgccctgctcctgaacttc

SEQ ID NO: 58852 - DNA, 22 bp, synthetic construct
  misc_feature 1..22: note = chemically synthesized
  source 1..22: mol_type = other DNA
ctcctgaacttcagctcctgca

SEQ ID NO: 58853 - DNA, 22 bp, synthetic construct
  misc_feature 1..22: note = chemically synthesized
  source 1..22: mol_type = other DNA
ctgaacttcagctcctgcacag

SEQ ID NO: 58854 - DNA, 22 bp, synthetic construct
  misc_feature 1..22: note = chemically synthesized
  source 1..22: mol_type = other DNA
aacttcagctcctgcacagtcc

SEQ ID NO: 58855 - DNA, 22 bp, synthetic construct
  misc_feature 1..22: note = chemically synthesized
  source 1..22: mol_type = other DNA
cagctcctgcacagtcctcccc

SEQ ID NO: 58856 - DNA, 22 bp, synthetic construct
  misc_feature 1..22: note = chemically synthesized
  source 1..22: mol_type = other DNA
agctcctgcacagtcctcccca

SEQ ID NO: 58857 - DNA, 22 bp, synthetic construct
  misc_feature 1..22: note = chemically synthesized
  source 1..22: mol_type = other DNA
ctgcacagtcctccccaccgca

SEQ ID NO: 58858 - DNA, 22 bp, synthetic construct
  misc_feature 1..22: note = chemically synthesized
  source 1..22: mol_type = other DNA
cacagtcctccccaccgcaagg

SEQ ID NO: 58859 - DNA, 22 bp, synthetic construct
  misc_feature 1..22: note = chemically synthesized
  source 1..22: mol_type = other DNA
cccaccgcaaggctcaaggcgc

SEQ ID NO: 58860 - DNA, 22 bp, synthetic construct
  misc_feature 1..22: note = chemically synthesized
  source 1..22: mol_type = other DNA
aaggcgccgccggcgtggaccg

SEQ ID NO: 58861 - DNA, 22 bp, synthetic construct
  misc_feature 1..22: note = chemically synthesized
  source 1..22: mol_type = other DNA
taggtctcctcgccaggacagc

SEQ ID NO: 58862 - DNA, 22 bp, synthetic construct
  misc_feature 1..22: note = chemically synthesized
  source 1..22: mol_type = other DNA
ggtctcctcgccaggacagcaa

SEQ ID NO: 58863 - DNA, 22 bp, synthetic construct
  misc_feature 1..22: note = chemically synthesized
  source 1..22: mol_type = other DNA
ctcgccaggacagcaacctctc

SEQ ID NO: 58864 - DNA, 22 bp, synthetic construct
  misc_feature 1..22: note = chemically synthesized
  source 1..22: mol_type = other DNA
gccaggacagcaacctctcccc

SEQ ID NO: 58865 - DNA, 22 bp, synthetic construct
  misc_feature 1..22: note = chemically synthesized
  source 1..22: mol_type = other DNA
tcccctggccctcatgggcacc

SEQ ID NO: 58866 - DNA, 22 bp, synthetic construct
  misc_feature 1..22: note = chemically synthesized
  source 1..22: mol_type = other DNA
ccctggccctcatgggcaccgt

SEQ ID NO: 58867 - DNA, 22 bp, synthetic construct
  misc_feature 1..22: note = chemically synthesized
  source 1..22: mol_type = other DNA
gccctcatgggcaccgtcagct

SEQ ID NO: 58868 - DNA, 22 bp, synthetic construct
  misc_feature 1..22: note = chemically synthesized
  source 1..22: mol_type = other DNA
atgggcaccgtcagctccaggc

SEQ ID NO: 58869 - DNA, 22 bp, synthetic construct
  misc_feature 1..22: note = chemically synthesized
  source 1..22: mol_type = other DNA
caggcggtcctggtggccgctg

SEQ ID NO: 58870 - DNA, 22 bp, synthetic construct
  misc_feature 1..22: note = chemically synthesized
  source 1..22: mol_type = other DNA
gtggccgctgccactgctgctg

SEQ ID NO: 58871 - DNA, 22 bp, synthetic construct
  misc_feature 1..22: note = chemically synthesized
  source 1..22: mol_type = other DNA
ccactgctgctgctgctgctgc

SEQ ID NO: 58872 - DNA, 22 bp, synthetic construct
  misc_feature 1..22: note = chemically synthesized
  source 1..22: mol_type = other DNA
ctgctgctgctgctgctgctcc

SEQ ID NO: 58873 - DNA, 22 bp, synthetic construct
  misc_feature 1..22: note = chemically synthesized
  source 1..22: mol_type = other DNA
ctgctgctgctgctgctcctgg

SEQ ID NO: 58874 - DNA, 22 bp, synthetic construct
  misc_feature 1..22: note = chemically synthesized
  source 1..22: mol_type = other DNA
ctgctgctgctgctcctgggtc

SEQ ID NO: 58875 - DNA, 22 bp, synthetic construct
  misc_feature 1..22: note = chemically synthesized
  source 1..22: mol_type = other DNA
ctgctgctgctcctgggtcccg

SEQ ID NO: 58876 - DNA, 22 bp, synthetic construct
  misc_feature 1..22: note = chemically synthesized
  source 1..22: mol_type = other DNA
ctgctgctcctgggtcccgcgg

SEQ ID NO: 58877 - DNA, 22 bp, synthetic construct
  misc_feature 1..22: note = chemically synthesized
  source 1..22: mol_type = other DNA
ctgctcctgggtcccgcgggcg

SEQ ID NO: 58878 - DNA, 22 bp, synthetic construct
  misc_feature 1..22: note = chemically synthesized
  source 1..22: mol_type = other DNA
ctcctgggtcccgcgggcgccc

SEQ ID NO: 58879 - DNA, 22 bp, synthetic construct
  misc_feature 1..22: note = chemically synthesized
  source 1..22: mol_type = other DNA
ctgggtcccgcgggcgcccgtg

SEQ ID NO: 58880 - DNA, 22 bp, synthetic construct
  misc_feature 1..22: note = chemically synthesized
  source 1..22: mol_type = other DNA
ggtcccgcgggcgcccgtgcgc

SEQ ID NO: 58881 - DNA, 22 bp, synthetic construct
  misc_feature 1..22: note = chemically synthesized
  source 1..22: mol_type = other DNA
cgaggagctggtgctagccttg

SEQ ID NO: 58882 - DNA, 22 bp, synthetic construct
  misc_feature 1..22: note = chemically synthesized
  source 1..22: mol_type = other DNA
gtgctagccttgcgttccgagg

SEQ ID NO: 58883 - DNA, 22 bp, synthetic construct
  misc_feature 1..22: note = chemically synthesized
  source 1..22: mol_type = other DNA
gccttgcgttccgaggaggacg

SEQ ID NO: 58884 - DNA, 22 bp, synthetic construct
  misc_feature 1..22: note = chemically synthesized
  source 1..22: mol_type = other DNA
gcgttccgaggaggacggcctg

SEQ ID NO: 58885 - DNA, 22 bp, synthetic construct
  misc_feature 1..22: note = chemically synthesized
  source 1..22: mol_type = other DNA
cgttccgaggaggacggcctgg

SEQ ID NO: 58886 - DNA, 22 bp, synthetic construct
  misc_feature 1..22: note = chemically synthesized
  source 1..22: mol_type = other DNA
cgaggaggacggcctggccgaa

SEQ ID NO: 58887 - DNA, 22 bp, synthetic construct
  misc_feature 1..22: note = chemically synthesized
  source 1..22: mol_type = other DNA
gccgaagcacccgagcacggaa

SEQ ID NO: 58888 - DNA, 22 bp, synthetic construct
  misc_feature 1..22: note = chemically synthesized
  source 1..22: mol_type = other DNA
ccaccgctgcgccaaggtgcgg

SEQ ID NO: 58889 - DNA, 22 bp, synthetic construct
  misc_feature 1..22: note = chemically synthesized
  source 1..22: mol_type = other DNA
caccgctgcgccaaggtgcggg

SEQ ID NO: 58890 - DNA, 22 bp, synthetic construct
  misc_feature 1..22: note = chemically synthesized
  source 1..22: mol_type = other DNA
cgccaaggtgcgggtgtaggga

SEQ ID NO: 58891 - DNA, 22 bp, synthetic construct
  misc_feature 1..22: note = chemically synthesized
  source 1..22: mol_type = other DNA
tttcctctcgggcctcagtttc

SEQ ID NO: 58892 - DNA, 22 bp, synthetic construct
  misc_feature 1..22: note = chemically synthesized
  source 1..22: mol_type = other DNA
cctctcgggcctcagtttcccc

SEQ ID NO: 58893 - DNA, 22 bp, synthetic construct
  misc_feature 1..22: note = chemically synthesized
  source 1..22: mol_type = other DNA
ctctcgggcctcagtttccccc

SEQ ID NO: 58894 - DNA, 22 bp, synthetic construct
  misc_feature 1..22: note = chemically synthesized
  source 1..22: mol_type = other DNA
tcgggcctcagtttccccccat

SEQ ID NO: 58895 - DNA, 22 bp, synthetic construct
  misc_feature 1..22: note = chemically synthesized
  source 1..22: mol_type = other DNA
gggcctcagtttccccccatgt

SEQ ID NO: 58896 - DNA, 22 bp, synthetic construct
  misc_feature 1..22: note = chemically synthesized
  source 1..22: mol_type = other DNA
agtttccccccatgtaagagag

SEQ ID NO: 58897 - DNA, 22 bp, synthetic construct
  misc_feature 1..22: note = chemically synthesized
  source 1..22: mol_type = other DNA
ccccccatgtaagagaggaagt

SEQ ID NO: 58898 - DNA, 22 bp, synthetic construct
  misc_feature 1..22: note = chemically synthesized
  source 1..22: mol_type = other DNA
cccccatgtaagagaggaagtg

SEQ ID NO: 58899 - DNA, 22 bp, synthetic construct
  misc_feature 1..22: note = chemically synthesized
  source 1..22: mol_type = other DNA
ttcgcttggcacgatcttgggg

SEQ ID NO: 58900 - DNA, 22 bp, synthetic construct
  misc_feature 1..22: note = chemically synthesized
  source 1..22: mol_type = other DNA
cgcttggcacgatcttggggac

SEQ ID NO: 58901 - DNA, 22 bp, synthetic construct
  misc_feature 1..22: note = chemically synthesized
  source 1..22: mol_type = other DNA
gcttggcacgatcttggggact

SEQ ID NO: 58902 - DNA, 22 bp, synthetic construct
  misc_feature 1..22: note = chemically synthesized
  source 1..22: mol_type = other DNA
ggcacgatcttggggactgcag

SEQ ID NO: 58903 - DNA, 22 bp, synthetic construct
  misc_feature 1..22: note = chemically synthesized
  source 1..22: mol_type = other DNA
gcacgatcttggggactgcagg

SEQ ID NO: 58904 - DNA, 22 bp, synthetic construct
  misc_feature 1..22: note = chemically synthesized
  source 1..22: mol_type = other DNA
ggggactgcaggcaaggcggcg

SEQ ID NO: 58905 - DNA, 22 bp, synthetic construct
  misc_feature 1..22: note = chemically synthesized
  source 1..22: mol_type = other DNA
gggactgcaggcaaggcggcgg

SEQ ID NO: 58906 - DNA, 22 bp, synthetic construct
  misc_feature 1..22: note = chemically synthesized
  source 1..22: mol_type = other DNA
caggcaaggcggcgggggagga

SEQ ID NO: 58907 - DNA, 22 bp, synthetic construct
  misc_feature 1..22: note = chemically synthesized
  source 1..22: mol_type = other DNA
tttggggacttgctggggcgtg

SEQ ID NO: 58908 - DNA, 22 bp, synthetic construct
  misc_feature 1..22: note = chemically synthesized
  source 1..22: mol_type = other DNA
tggggacttgctggggcgtgcg

SEQ ID NO: 58909 - DNA, 22 bp, synthetic construct
  misc_feature 1..22: note = chemically synthesized
  source 1..22: mol_type = other DNA
ggggacttgctggggcgtgcgg

SEQ ID NO: 58910 - DNA, 22 bp, synthetic construct
  misc_feature 1..22: note = chemically synthesized
  source 1..22: mol_type = other DNA
gggacttgctggggcgtgcggc

SEQ ID NO: 58911 - DNA, 22 bp, synthetic construct
  misc_feature 1..22: note = chemically synthesized
  source 1..22: mol_type = other DNA
gctggggcgtgcggctgcgcta

SEQ ID NO: 58912 - DNA, 22 bp, synthetic construct
  misc_feature 1..22: note = chemically synthesized
  source 1..22: mol_type = other DNA
ctggggcgtgcggctgcgctat

SEQ ID NO: 58913 - DNA, 22 bp, synthetic construct
  misc_feature 1..22: note = chemically synthesized
  source 1..22: mol_type = other DNA
gggcgtgcggctgcgctattca

SEQ ID NO: 58914 - DNA, 22 bp, synthetic construct
  misc_feature 1..22: note = chemically synthesized
  source 1..22: mol_type = other DNA
cgctattcagtgggaaggttcg

SEQ ID NO: 58915 - DNA, 22 bp, synthetic construct
  misc_feature 1..22: note = chemically synthesized
  source 1..22: mol_type = other DNA
ttcagtgggaaggttcgcgggg

SEQ ID NO: 58916 - DNA, 22 bp, synthetic construct
  misc_feature 1..22: note = chemically synthesized
  source 1..22: mol_type = other DNA
agtgggaaggttcgcggggttg

SEQ ID NO: 58917 - DNA, 22 bp, synthetic construct
  misc_feature 1..22: note = chemically synthesized
  source 1..22: mol_type = other DNA
gcggggttgggagacccggagg

SEQ ID NO: 58918 - DNA, 22 bp, synthetic construct
  misc_feature 1..22: note = chemically synthesized
  source 1..22: mol_type = other DNA
ggagacccggaggccgaggaag

SEQ ID NO: 58919 - DNA, 22 bp, synthetic construct
  misc_feature 1..22: note = chemically synthesized
  source 1..22: mol_type = other DNA
ccaggatatcctgcccagattt

SEQ ID NO: 58920 - DNA, 22 bp, synthetic construct
  misc_feature 1..22: note = chemically synthesized
  source 1..22: mol_type = other DNA
cccagatttcccagtttctgcc

SEQ ID NO: 58921 - DNA, 22 bp, synthetic construct
  misc_feature 1..22: note = chemically synthesized
  source 1..22: mol_type = other DNA
cccagtttctgcctcgccgcgg

SEQ ID NO: 58922 - DNA, 22 bp, synthetic construct
  misc_feature 1..22: note = chemically synthesized
  source 1..22: mol_type = other DNA
ccagtttctgcctcgccgcggc

SEQ ID NO: 58923 - DNA, 22 bp, synthetic construct
  misc_feature 1..22: note = chemically synthesized
  source 1..22: mol_type = other DNA
ctgcctcgccgcggcacaggtg

SEQ ID NO: 58924 - DNA, 22 bp, synthetic construct
  misc_feature 1..22: note = chemically synthesized
  source 1..22: mol_type = other DNA
tgcctcgccgcggcacaggtgg

SEQ ID NO: 58925 - DNA, 22 bp, synthetic construct
  misc_feature 1..22: note = chemically synthesized
  source 1..22: mol_type = other DNA
cctcgccgcggcacaggtgggt

SEQ ID NO: 58926 - DNA, 22 bp, synthetic construct
  misc_feature 1..22: note = chemically synthesized
  source 1..22: mol_type = other DNA
gccgcggcacaggtgggtgaag

SEQ ID NO: 58927 - DNA, 22 bp, synthetic construct
  misc_feature 1..22: note = chemically synthesized
  source 1..22: mol_type = other DNA
gaacgtactgggaactgcacca

SEQ ID NO: 58928 - DNA, 22 bp, synthetic construct
  misc_feature 1..22: note = chemically synthesized
  source 1..22: mol_type = other DNA
ggaactgcaccaggcacagaga

SEQ ID NO: 58929 - DNA, 22 bp, synthetic construct
  misc_feature 1..22: note = chemically synthesized
  source 1..22: mol_type = other DNA
caccaggcacagagaaagcggg

SEQ ID NO: 58930 - DNA, 22 bp, synthetic construct
  misc_feature 1..22: note = chemically synthesized
  source 1..22: mol_type = other DNA
gccattatagtgggttccgatt

SEQ ID NO: 58931 - DNA, 22 bp, synthetic construct
  misc_feature 1..22: note = chemically synthesized
  source 1..22: mol_type = other DNA
ccattatagtgggttccgattt

SEQ ID NO: 58932 - DNA, 22 bp, synthetic construct
  misc_feature 1..22: note = chemically synthesized
  source 1..22: mol_type = other DNA
tagtgggttccgatttggtttg

SEQ ID NO: 58933 - DNA, 22 bp, synthetic construct
  misc_feature 1..22: note = chemically synthesized
  source 1..22: mol_type = other DNA
cgatttggtttggaaaacatgg

SEQ ID NO: 58934 - DNA, 22 bp, synthetic construct
  misc_feature 1..22: note = chemically synthesized
  source 1..22: mol_type = other DNA
ggtttggaaaacatgggcagcg

SEQ ID NO: 58935 - DNA, 22 bp, synthetic construct
  misc_feature 1..22: note = chemically synthesized
  source 1..22: mol_type = other DNA
gtttggaaaacatgggcagcgg

SEQ ID NO: 58936 - DNA, 22 bp, synthetic construct
  misc_feature 1..22: note = chemically synthesized
  source 1..22: mol_type = other DNA
ggaaaacatgggcagcggaggg

SEQ ID NO: 58937 - DNA, 22 bp, synthetic construct
  misc_feature 1..22: note = chemically synthesized
  source 1..22: mol_type = other DNA
gaaaacatgggcagcggagggt

SEQ ID NO: 58938 - DNA, 22 bp, synthetic construct
  misc_feature 1..22: note = chemically synthesized
  source 1..22: mol_type = other DNA
gagagaaggccctacccgagac

SEQ ID NO: 58939 - DNA, 22 bp, synthetic construct
  misc_feature 1..22: note = chemically synthesized
  source 1..22: mol_type = other DNA
cccgagacaggggcggggtggg

SEQ ID NO: 58940 - DNA, 22 bp, synthetic construct
  misc_feature 1..22: note = chemically synthesized
  source 1..22: mol_type = other DNA
ggagcacgaggcaatttcttta

SEQ ID NO: 58941 - DNA, 22 bp, synthetic construct
  misc_feature 1..22: note = chemically synthesized
  source 1..22: mol_type = other DNA
ctttatgacacagaactcatgc

SEQ ID NO: 58942 - DNA, 22 bp, synthetic construct
  misc_feature 1..22: note = chemically synthesized
  source 1..22: mol_type = other DNA
tttatgacacagaactcatgct

SEQ ID NO: 58943 - DNA, 22 bp, synthetic construct
  misc_feature 1..22: note = chemically synthesized
  source 1..22: mol_type = other DNA
tatgacacagaactcatgctct

SEQ ID NO: 58944 - DNA, 22 bp, synthetic construct
  misc_feature 1..22: note = chemically synthesized
  source 1..22: mol_type = other DNA
atgacacagaactcatgctcta

SEQ ID NO: 58945 - DNA, 22 bp, synthetic construct
  misc_feature 1..22: note = chemically synthesized
  source 1..22: mol_type = other DNA
tgacacagaactcatgctctag

SEQ ID NO: 58946 - DNA, 22 bp, synthetic construct
  misc_feature 1..22: note = chemically synthesized
  source 1..22: mol_type = other DNA
atgctctagtattccatctgtt

SEQ ID NO: 58947 - DNA, 22 bp, synthetic construct
  misc_feature 1..22: note = chemically synthesized
  source 1..22: mol_type = other DNA
tagtattccatctgtttcagcc

SEQ ID NO: 58948 - DNA, 22 bp, synthetic construct
  misc_feature 1..22: note = chemically synthesized
  source 1..22: mol_type = other DNA
gtattccatctgtttcagccga

SEQ ID NO: 58949 - DNA, 22 bp, synthetic construct
  misc_feature 1..22: note = chemically synthesized
  source 1..22: mol_type = other DNA
catctgtttcagccgaagaaaa

SEQ ID NO: 58950 - DNA, 22 bp, synthetic construct
  misc_feature 1..22: note = chemically synthesized
  source 1..22: mol_type = other DNA
tttcagccgaagaaaagaacca

SEQ ID NO: 58951 - DNA, 22 bp, synthetic construct
  misc_feature 1..22: note = chemically synthesized
  source 1..22: mol_type = other DNA
cagccgaagaaaagaaccagct

SEQ ID NO: 58952 - DNA, 22 bp, synthetic construct
  misc_feature 1..22: note = chemically synthesized
  source 1..22: mol_type = other DNA
agccgaagaaaagaaccagctg

SEQ ID NO: 58953 - DNA, 22 bp, synthetic construct
  misc_feature 1..22: note = chemically synthesized
  source 1..22: mol_type = other DNA
aaggggcaggggagaaggggcg

SEQ ID NO: 58954 - DNA, 22 bp, synthetic construct
  misc_feature 1..22: note = chemically synthesized
  source 1..22: mol_type = other DNA
tcgaggcccattggcgtccttt

SEQ ID NO: 58955 - DNA, 22 bp, synthetic construct
  misc_feature 1..22: note = chemically synthesized
  source 1..22: mol_type = other DNA
gaggcccattggcgtcctttag

SEQ ID NO: 58956 - DNA, 22 bp, synthetic construct
  misc_feature 1..22: note = chemically synthesized
  source 1..22: mol_type = other DNA
gcgtcctttaggactcaggcag

SEQ ID NO: 58957 - DNA, 22 bp, synthetic construct
  misc_feature 1..22: note = chemically synthesized
  source 1..22: mol_type = other DNA
taggactcaggcagggaagggc

SEQ ID NO: 58958 - DNA, 22 bp, synthetic construct
  misc_feature 1..22: note = chemically synthesized
  source 1..22: mol_type = other DNA
aggactcaggcagggaagggcc

SEQ ID NO: 58959 - DNA, 22 bp, synthetic construct
  misc_feature 1..22: note = chemically synthesized
  source 1..22: mol_type = other DNA
ggactcaggcagggaagggccc

SEQ ID NO: 58960 - DNA, 22 bp, synthetic construct
  misc_feature 1..22: note = chemically synthesized
  source 1..22: mol_type = other DNA
aggcagggaagggcccttggtg

SEQ ID NO: 58961 - DNA, 22 bp, synthetic construct
  misc_feature 1..22: note = chemically synthesized
  source 1..22: mol_type = other DNA
ggtgctctggagccggaggtgg

SEQ ID NO: 58962 - DNA, 22 bp, synthetic construct
  misc_feature 1..22: note = chemically synthesized
  source 1..22: mol_type = other DNA
gtgctctggagccggaggtggt

SEQ ID NO: 58963 - DNA, 22 bp, synthetic construct
  misc_feature 1..22: note = chemically synthesized
  source 1..22: mol_type = other DNA
tggagccggaggtggtgcgcct

SEQ ID NO: 58964 - DNA, 22 bp, synthetic construct
  misc_feature 1..22: note = chemically synthesized
  source 1..22: mol_type = other DNA
gagccggaggtggtgcgcctgg

SEQ ID NO: 58965 - DNA, 22 bp, synthetic construct
  misc_feature 1..22: note = chemically synthesized
  source 1..22: mol_type = other DNA
gtactgggaccccggagctgag

SEQ ID NO: 58966 - DNA, 22 bp, synthetic construct
  misc_feature 1..22: note = chemically synthesized
  source 1..22: mol_type = other DNA
ggaccccggagctgagcccggc

SEQ ID NO: 58967 - DNA, 22 bp, synthetic construct
  misc_feature 1..22: note = chemically synthesized
  source 1..22: mol_type = other DNA
agcccggcgcctcagcccacct

SEQ ID NO: 58968 - DNA, 22 bp, synthetic construct
  misc_feature 1..22: note = chemically synthesized
  source 1..22: mol_type = other DNA
agcccacctggctgtctgccga

SEQ ID NO: 58969 - DNA, 22 bp, synthetic construct
  misc_feature 1..22: note = chemically synthesized
  source 1..22: mol_type = other DNA
gctgtctgccgaccgtgtgcgg

SEQ ID NO: 58970 - DNA, 22 bp, synthetic construct
  misc_feature 1..22: note = chemically synthesized
  source 1..22: mol_type = other DNA
tctgccgaccgtgtgcggggcg

SEQ ID NO: 58971 - DNA, 22 bp, synthetic construct
  misc_feature 1..22: note = chemically synthesized
  source 1..22: mol_type = other DNA
ccgaccgtgtgcggggcgagtt

SEQ ID NO: 58972 - DNA, 22 bp, synthetic construct
  misc_feature 1..22: note = chemically synthesized
  source 1..22: mol_type = other DNA
gctcaacaactctgccagcttc

SEQ ID NO: 58973 - DNA, 22 bp, synthetic construct
  misc_feature 1..22: note = chemically synthesized
  source 1..22: mol_type = other DNA
ctcaacaactctgccagcttct

SEQ ID NO: 58974 - DNA, 22 bp, synthetic construct
  misc_feature 1..22: note = chemically synthesized
  source 1..22: mol_type = other DNA
aacaactctgccagcttctggc

SEQ ID NO: 58975 - DNA, 22 bp, synthetic construct
  misc_feature 1..22: note = chemically synthesized
  source 1..22: mol_type = other DNA
tgccagcttctggccctcaggc

SEQ ID NO: 58976 - DNA, 22 bp, synthetic construct
  misc_feature 1..22: note = chemically synthesized
  source 1..22: mol_type = other DNA
ccagcttctggccctcaggctg

SEQ ID NO: 58977 - DNA, 22 bp, synthetic construct
  misc_feature 1..22: note = chemically synthesized
  source 1..22: mol_type = other DNA
ctggccctcaggctgtgggaag

SEQ ID NO: 58978 - DNA, 22 bp, synthetic construct
  misc_feature 1..22: note = chemically synthesized
  source 1..22: mol_type = other DNA
tggccctcaggctgtgggaagc

SEQ ID NO: 58979 - DNA, 22 bp, synthetic construct
  misc_feature 1..22: note = chemically synthesized
  source 1..22: mol_type = other DNA
gccctcaggctgtgggaagctt

SEQ ID NO: 58980 - DNA, 22 bp, synthetic construct
  misc_feature 1..22: note = chemically synthesized
  source 1..22: mol_type = other DNA
aggctgtgggaagcttcttccc

SEQ ID NO: 58981 - DNA, 22 bp, synthetic construct
  misc_feature 1..22: note = chemically synthesized
  source 1..22: mol_type = other DNA
tgggaagcttcttcccggggcg

SEQ ID NO: 58982 - DNA, 22 bp, synthetic construct
  misc_feature 1..22: note = chemically synthesized
  source 1..22: mol_type = other DNA
cttcccggggcgagaccactag

SEQ ID NO: 58983 - DNA, 22 bp, synthetic construct
  misc_feature 1..22: note = chemically synthesized
  source 1..22: mol_type = other DNA
ttcccggggcgagaccactagc

SEQ ID NO: 58984 - DNA, 22 bp, synthetic construct
  misc_feature 1..22: note = chemically synthesized
  source 1..22: mol_type = other DNA
cccggggcgagaccactagctt

SEQ ID NO: 58985 - DNA, 22 bp, synthetic construct
  misc_feature 1..22: note = chemically synthesized
  source 1..22: mol_type = other DNA
ccggggcgagaccactagcttt

SEQ ID NO: 58986 - DNA, 22 bp, synthetic construct
  misc_feature 1..22: note = chemically synthesized
  source 1..22: mol_type = other DNA
gctttttctaagtattaccagc

SEQ ID NO: 58987 - DNA, 22 bp, synthetic construct
  misc_feature 1..22: note = chemically synthesized
  source 1..22: mol_type = other DNA
tttctaagtattaccagcccag

SEQ ID NO: 58988 - DNA, 22 bp, synthetic construct
  misc_feature 1..22: note = chemically synthesized
  source 1..22: mol_type = other DNA
ttctaagtattaccagcccagg

SEQ ID NO: 58989 - DNA, 22 bp, synthetic construct
  misc_feature 1..22: note = chemically synthesized
  source 1..22: mol_type = other DNA
tctaagtattaccagcccagga

SEQ ID NO: 58990 - DNA, 22 bp, synthetic construct
  misc_feature 1..22: note = chemically synthesized
  source 1..22: mol_type = other DNA
ctaagtattaccagcccaggac

SEQ ID NO: 58991 - DNA, 22 bp, synthetic construct
  misc_feature 1..22: note = chemically synthesized
  source 1..22: mol_type = other DNA
taagtattaccagcccaggact

SEQ ID NO: 58992 - DNA, 22 bp, synthetic construct
  misc_feature 1..22: note = chemically synthesized
  source 1..22: mol_type = other DNA
agtattaccagcccaggacttg

SEQ ID NO: 58993 - DNA, 22 bp, synthetic construct
  misc_feature 1..22: note = chemically synthesized
  source 1..22: mol_type = other DNA
ccagcccaggacttggctgagg

SEQ ID NO: 58994 - DNA, 22 bp, synthetic construct
  misc_feature 1..22: note = chemically synthesized
  source 1..22: mol_type = other DNA
ggctgaggttctgtgtccccca

SEQ ID NO: 58995 - DNA, 22 bp, synthetic construct
  misc_feature 1..22: note = chemically synthesized
  source 1..22: mol_type = other DNA
gctgaggttctgtgtcccccag

SEQ ID NO: 58996 - DNA, 22 bp, synthetic construct
  misc_feature 1..22: note = chemically synthesized
  source 1..22: mol_type = other DNA
aggttctgtgtcccccagcttg

SEQ ID NO: 58997 - DNA, 22 bp, synthetic construct
  misc_feature 1..22: note = chemically synthesized
  source 1..22: mol_type = other DNA
tgtgtcccccagcttggagtca

SEQ ID NO: 58998 - DNA, 22 bp, synthetic construct
  misc_feature 1..22: note = chemically synthesized
  source 1..22: mol_type = other DNA
tgtcccccagcttggagtcaga

SEQ ID NO: 58999 - DNA, 22 bp, synthetic construct
  misc_feature 1..22: note = chemically synthesized
  source 1..22: mol_type = other DNA
ggagtcagatgtggggttgaat

SEQ ID NO: 59000 - DNA, 22 bp, synthetic construct
  misc_feature 1..22: note = chemically synthesized
  source 1..22: mol_type = other DNA
gagtcagatgtggggttgaatc

SEQ ID NO: 59001 - DNA, 22 bp, synthetic construct
  misc_feature 1..22: note = chemically synthesized
  source 1..22: mol_type = other DNA
aatcttggcttcctctcactag

SEQ ID NO: 59002 - DNA, 22 bp, synthetic construct
  misc_feature 1..22: note = chemically synthesized
  source 1..22: mol_type = other DNA
ggcttcctctcactagctgtgg

SEQ ID NO: 59003 - DNA, 22 bp, synthetic construct
  misc_feature 1..22: note = chemically synthesized
  source 1..22: mol_type = other DNA
gcttcctctcactagctgtggt

SEQ ID NO: 59004 - DNA, 22 bp, synthetic construct
  misc_feature 1..22: note = chemically synthesized
  source 1..22: mol_type = other DNA
cctctcactagctgtggtgctt

SEQ ID NO: 59005 - DNA, 22 bp, synthetic construct
  misc_feature 1..22: note = chemically synthesized
  source 1..22: mol_type = other DNA
ctctcactagctgtggtgcttg

SEQ ID NO: 59006 - DNA, 22 bp, synthetic construct
  misc_feature 1..22: note = chemically synthesized
  source 1..22: mol_type = other DNA
tcactagctgtggtgcttgaca

SEQ ID NO: 59007 - DNA, 22 bp, synthetic construct
  misc_feature 1..22: note = chemically synthesized
  source 1..22: mol_type = other DNA
actagctgtggtgcttgacaag

SEQ ID NO: 59008 - DNA, 22 bp, synthetic construct
  misc_feature 1..22: note = chemically synthesized
  source 1..22: mol_type = other DNA
gctgtggtgcttgacaagtcac

SEQ ID NO: 59009 - DNA, 22 bp, synthetic construct
  misc_feature 1..22: note = chemically synthesized
  source 1..22: mol_type = other DNA
tggtgcttgacaagtcacttat

SEQ ID NO: 59010 - DNA, 22 bp, synthetic construct
  misc_feature 1..22: note = chemically synthesized
  source 1..22: mol_type = other DNA
gacaagtcacttatccttgagc

SEQ ID NO: 59011 - DNA, 22 bp, synthetic construct
  misc_feature 1..22: note = chemically synthesized
  source 1..22: mol_type = other DNA
acaagtcacttatccttgagcc

SEQ ID NO: 59012 - DNA, 22 bp, synthetic construct
  misc_feature 1..22: note = chemically synthesized
  source 1..22: mol_type = other DNA
atccttgagcctccattgccta

SEQ ID NO: 59013 - DNA, 22 bp, synthetic construct
  misc_feature 1..22: note = chemically synthesized
  source 1..22: mol_type = other DNA
tccttgagcctccattgcctaa

SEQ ID NO: 59014 - DNA, 22 bp, synthetic construct
  misc_feature 1..22: note = chemically synthesized
  source 1..22: mol_type = other DNA
gagcctccattgcctaatcttt

SEQ ID NO: 59015 - DNA, 22 bp, synthetic construct
  misc_feature 1..22: note = chemically synthesized
  source 1..22: mol_type = other DNA
agcctccattgcctaatcttta

SEQ ID NO: 59016 - DNA, 22 bp, synthetic construct
  misc_feature 1..22: note = chemically synthesized
  source 1..22: mol_type = other DNA
cattgcctaatctttaaaaggg

SEQ ID NO: 59017 - DNA, 22 bp, synthetic construct
  misc_feature 1..22: note = chemically synthesized
  source 1..22: mol_type = other DNA
cctaatctttaaaagggaggtg

SEQ ID NO: 59018 - DNA, 22 bp, synthetic construct
  misc_feature 1..22: note = chemically synthesized
  source 1..22: mol_type = other DNA
atctttaaaagggaggtgacaa

SEQ ID NO: 59019 - DNA, 22 bp, synthetic construct
  misc_feature 1..22: note = chemically synthesized
  source 1..22: mol_type = other DNA
taaaagggaggtgacaatcgtc

SEQ ID NO: 59020 - DNA, 22 bp, synthetic construct
  misc_feature 1..22: note = chemically synthesized
  source 1..22: mol_type = other DNA
aaaagggaggtgacaatcgtcc

SEQ ID NO: 59021 - DNA, 22 bp, synthetic construct
  misc_feature 1..22: note = chemically synthesized
  source 1..22: mol_type = other DNA
aaagggaggtgacaatcgtccc

SEQ ID NO: 59022 - DNA, 22 bp, synthetic construct
  misc_feature 1..22: note = chemically synthesized
  source 1..22: mol_type = other DNA
cggctcagtggcagcagatggg

SEQ ID NO: 59023 - DNA, 22 bp, synthetic construct
  misc_feature 1..22: note = chemically synthesized
  source 1..22: mol_type = other DNA
agtggcagcagatggggagatg

SEQ ID NO: 59024 - DNA, 22 bp, synthetic construct
  misc_feature 1..22: note = chemically synthesized
  source 1..22: mol_type = other DNA
tgttgaccatgagtgaacttac

SEQ ID NO: 59025 - DNA, 22 bp, synthetic construct
  misc_feature 1..22: note = chemically synthesized
  source 1..22: mol_type = other DNA
ttgaccatgagtgaacttacaa

SEQ ID NO: 59026 - DNA, 22 bp, synthetic construct
  misc_feature 1..22: note = chemically synthesized
  source 1..22: mol_type = other DNA
accatgagtgaacttacaatgc

SEQ ID NO: 59027 - DNA, 22 bp, synthetic construct
  misc_feature 1..22: note = chemically synthesized
  source 1..22: mol_type = other DNA
acaatgcaagccccggggggat

SEQ ID NO: 59028 - DNA, 22 bp, synthetic construct
  misc_feature 1..22: note = chemically synthesized
  source 1..22: mol_type = other DNA
caatgcaagccccggggggatc

SEQ ID NO: 59029 - DNA, 22 bp, synthetic construct
  misc_feature 1..22: note = chemically synthesized
  source 1..22: mol_type = other DNA
gcagttttgtccctgtctgcag

SEQ ID NO: 59030 - DNA, 22 bp, synthetic construct
  misc_feature 1..22: note = chemically synthesized
  source 1..22: mol_type = other DNA
cagttttgtccctgtctgcagt

SEQ ID NO: 59031 - DNA, 22 bp, synthetic construct
  misc_feature 1..22: note = chemically synthesized
  source 1..22: mol_type = other DNA
tgtccctgtctgcagtgtgacc

SEQ ID NO: 59032 - DNA, 22 bp, synthetic construct
  misc_feature 1..22: note = chemically synthesized
  source 1..22: mol_type = other DNA
gtccctgtctgcagtgtgacct

SEQ ID NO: 59033 - DNA, 22 bp, synthetic construct
  misc_feature 1..22: note = chemically synthesized
  source 1..22: mol_type = other DNA
tccctgtctgcagtgtgacctg

SEQ ID NO: 59034 - DNA, 22 bp, synthetic construct
  misc_feature 1..22: note = chemically synthesized
  source 1..22: mol_type = other DNA
tctgcagtgtgacctgttggtg

SEQ ID NO: 59035 - DNA, 22 bp, synthetic construct
  misc_feature 1..22: note = chemically synthesized
  source 1..22: mol_type = other DNA
cagtgtgacctgttggtgacat

SEQ ID NO: 59036 - DNA, 22 bp, synthetic construct
  misc_feature 1..22: note = chemically synthesized
  source 1..22: mol_type = other DNA
ttggtgacattgtctttgctcc

SEQ ID NO: 59037 - DNA, 22 bp, synthetic construct
  misc_feature 1..22: note = chemically synthesized
  source 1..22: mol_type = other DNA
gtgacattgtctttgctccaaa

SEQ ID NO: 59038 - DNA, 22 bp, synthetic construct
  misc_feature 1..22: note = chemically synthesized
  source 1..22: mol_type = other DNA
tctttgctccaaaccacagctc

SEQ ID NO: 59039 - DNA, 22 bp, synthetic construct
  misc_feature 1..22: note = chemically synthesized
  source 1..22: mol_type = other DNA
tgctccaaaccacagctcctgg

SEQ ID NO: 59040 - DNA, 22 bp, synthetic construct
  misc_feature 1..22: note = chemically synthesized
  source 1..22: mol_type = other DNA
gctccaaaccacagctcctggg

SEQ ID NO: 59041 - DNA, 22 bp, synthetic construct
  misc_feature 1..22: note = chemically synthesized
  source 1..22: mol_type = other DNA
ctccaaaccacagctcctgggg

SEQ ID NO: 59042 - DNA, 22 bp, synthetic construct
  misc_feature 1..22: note = chemically synthesized
  source 1..22: mol_type = other DNA
caaaccacagctcctggggcag

SEQ ID NO: 59043 - DNA, 22 bp, synthetic construct
  misc_feature 1..22: note = chemically synthesized
  source 1..22: mol_type = other DNA
ctggggcagaggggaaaattct

SEQ ID NO: 59044 - DNA, 22 bp, synthetic construct
  misc_feature 1..22: note = chemically synthesized
  source 1..22: mol_type = other DNA
gggcagaggggaaaattctgcc

SEQ ID NO: 59045 - DNA, 22 bp, synthetic construct
  misc_feature 1..22: note = chemically synthesized
  source 1..22: mol_type = other DNA
tgccactcacagctgcctgccc

SEQ ID NO: 59046 - DNA, 22 bp, synthetic construct
  misc_feature 1..22: note = chemically synthesized
  source 1..22: mol_type = other DNA
ccactcacagctgcctgcccac

SEQ ID NO: 59047 - DNA, 22 bp, synthetic construct
  misc_feature 1..22: note = chemically synthesized
  source 1..22: mol_type = other DNA
acagctgcctgcccacgcttct

SEQ ID NO: 59048 - DNA, 22 bp, synthetic construct
  misc_feature 1..22: note = chemically synthesized
  source 1..22: mol_type = other DNA
cctgcccacgcttctgtctgag

SEQ ID NO: 59049 - DNA, 22 bp, synthetic construct
  misc_feature 1..22: note = chemically synthesized
  source 1..22: mol_type = other DNA
cccacgcttctgtctgagtgtg

SEQ ID NO: 59050 - DNA, 22 bp, synthetic construct
  misc_feature 1..22: note = chemically synthesized
  source 1..22: mol_type = other DNA
ctgtctgagtgtgctgggtggc

SEQ ID NO: 59051 - DNA, 22 bp, synthetic construct
  misc_feature 1..22: note = chemically synthesized
  source 1..22: mol_type = other DNA
tgtctgagtgtgctgggtggca

SEQ ID NO: 59052 - DNA, 22 bp, synthetic construct
  misc_feature 1..22: note = chemically synthesized
  source 1..22: mol_type = other DNA
tctgagtgtgctgggtggcagg

SEQ ID NO: 59053 - DNA, 22 bp, synthetic construct
  misc_feature 1..22: note = chemically synthesized
  source 1..22: mol_type = other DNA
agtgtgctgggtggcaggatgg

SEQ ID NO: 59054 - DNA, 22 bp, synthetic construct
  misc_feature 1..22: note = chemically synthesized
  source 1..22: mol_type = other DNA
ggtggcaggatggcaagtcctt

SEQ ID NO: 59055 - DNA, 22 bp, synthetic construct
  misc_feature 1..22: note = chemically synthesized
  source 1..22: mol_type = other DNA
actcagctcagtatagccctct

SEQ ID NO: 59056 - DNA, 22 bp, synthetic construct
  misc_feature 1..22: note = chemically synthesized
  source 1..22: mol_type = other DNA
ctcagctcagtatagccctctt

SEQ ID NO: 59057 - DNA, 22 bp, synthetic construct
  misc_feature 1..22: note = chemically synthesized
  source 1..22: mol_type = other DNA
agctcagtatagccctcttcct

SEQ ID NO: 59058 - DNA, 22 bp, synthetic construct
  misc_feature 1..22: note = chemically synthesized
  source 1..22: mol_type = other DNA
agtatagccctcttccttgttc

SEQ ID NO: 59059 - DNA, 22 bp, synthetic construct
  misc_feature 1..22: note = chemically synthesized
  source 1..22: mol_type = other DNA
ttccttgttccctgagcctttg

SEQ ID NO: 59060 - DNA, 22 bp, synthetic construct
  misc_feature 1..22: note = chemically synthesized
  source 1..22: mol_type = other DNA
ccttgttccctgagcctttgac

SEQ ID NO: 59061 - DNA, 22 bp, synthetic construct
  misc_feature 1..22: note = chemically synthesized
  source 1..22: mol_type = other DNA
cttgttccctgagcctttgact

SEQ ID NO: 59062 - DNA, 22 bp, synthetic construct
  misc_feature 1..22: note = chemically synthesized
  source 1..22: mol_type = other DNA
gttccctgagcctttgactttc

SEQ ID NO: 59063 - DNA, 22 bp, synthetic construct
  misc_feature 1..22: note = chemically synthesized
  source 1..22: mol_type = other DNA
ttccctgagcctttgactttct

SEQ ID NO: 59064 - DNA, 22 bp, synthetic construct
  misc_feature 1..22: note = chemically synthesized
  source 1..22: mol_type = other DNA
cctgagcctttgactttctcga

SEQ ID NO: 59065 - DNA, 22 bp, synthetic construct
  misc_feature 1..22: note = chemically synthesized
  source 1..22: mol_type = other DNA
agcctttgactttctcgaggga

SEQ ID NO: 59066 - DNA, 22 bp, synthetic construct
  misc_feature 1..22: note = chemically synthesized
  source 1..22: mol_type = other DNA
tgactttctcgagggatgttgt

SEQ ID NO: 59067 - DNA, 22 bp, synthetic construct
  misc_feature 1..22: note = chemically synthesized
  source 1..22: mol_type = other DNA
gactttctcgagggatgttgtg

SEQ ID NO: 59068 - DNA, 22 bp, synthetic construct
  misc_feature 1..22: note = chemically synthesized
  source 1..22: mol_type = other DNA
actttctcgagggatgttgtgg

SEQ ID NO: 59069 - DNA, 22 bp, synthetic construct
  misc_feature 1..22: note = chemically synthesized
  source 1..22: mol_type = other DNA
tctcgagggatgttgtggggtt

SEQ ID NO: 59070 - DNA, 22 bp, synthetic construct
  misc_feature 1..22: note = chemically synthesized
  source 1..22: mol_type = other DNA
ctcgagggatgttgtggggttg

SEQ ID NO: 59071 - DNA, 22 bp, synthetic construct
  misc_feature 1..22: note = chemically synthesized
  source 1..22: mol_type = other DNA
tcgagggatgttgtggggttgt

SEQ ID NO: 59072 - DNA, 22 bp, synthetic construct
  misc_feature 1..22: note = chemically synthesized
  source 1..22: mol_type = other DNA
gagggatgttgtggggttgtgg

SEQ ID NO: 59073 - DNA, 22 bp, synthetic construct
  misc_feature 1..22: note = chemically synthesized
  source 1..22: mol_type = other DNA
tggggttgtggccaggataaga

SEQ ID NO: 59074 - DNA, 22 bp, synthetic construct
  misc_feature 1..22: note = chemically synthesized
  source 1..22: mol_type = other DNA
tggccaggataagaaagggcat

SEQ ID NO: 59075 - DNA, 22 bp, synthetic construct
  misc_feature 1..22: note = chemically synthesized
  source 1..22: mol_type = other DNA
caagttaccactgctccaaaac

SEQ ID NO: 59076 - DNA, 22 bp, synthetic construct
  misc_feature 1..22: note = chemically synthesized
  source 1..22: mol_type = other DNA
aagttaccactgctccaaaaca

SEQ ID NO: 59077 - DNA, 22 bp, synthetic construct
  misc_feature 1..22: note = chemically synthesized
  source 1..22: mol_type = other DNA
ccactgctccaaaacaactgtt

SEQ ID NO: 59078 - DNA, 22 bp, synthetic construct
  misc_feature 1..22: note = chemically synthesized
  source 1..22: mol_type = other DNA
ctccaaaacaactgttctggaa

SEQ ID NO: 59079 - DNA, 22 bp, synthetic construct
  misc_feature 1..22: note = chemically synthesized
  source 1..22: mol_type = other DNA
caaaacaactgttctggaaata

SEQ ID NO: 59080 - DNA, 22 bp, synthetic construct
  misc_feature 1..22: note = chemically synthesized
  source 1..22: mol_type = other DNA
ttctggaaatagtgagtacccc

SEQ ID NO: 59081 - DNA, 22 bp, synthetic construct
  misc_feature 1..22: note = chemically synthesized
  source 1..22: mol_type = other DNA
tggaaatagtgagtaccccatc

SEQ ID NO: 59082 - DNA, 22 bp, synthetic construct
  misc_feature 1..22: note = chemically synthesized
  source 1..22: mol_type = other DNA
gaaatagtgagtaccccatcct

SEQ ID NO: 59083 - DNA, 22 bp, synthetic construct
  misc_feature 1..22: note = chemically synthesized
  source 1..22: mol_type = other DNA
agaggtgagtaagcagaggctg

SEQ ID NO: 59084 - DNA, 22 bp, synthetic construct
  misc_feature 1..22: note = chemically synthesized
  source 1..22: mol_type = other DNA
tatgaccacctgaaccaagccc

SEQ ID NO: 59085 - DNA, 22 bp, synthetic construct
  misc_feature 1..22: note = chemically synthesized
  source 1..22: mol_type = other DNA
aaccaagcccttgaggatgttt

SEQ ID NO: 59086 - DNA, 22 bp, synthetic construct
  misc_feature 1..22: note = chemically synthesized
  source 1..22: mol_type = other DNA
gaggatgtttcttctctggtgg

SEQ ID NO: 59087 - DNA, 22 bp, synthetic construct
  misc_feature 1..22: note = chemically synthesized
  source 1..22: mol_type = other DNA
aggatgtttcttctctggtgga

SEQ ID NO: 59088 - DNA, 22 bp, synthetic construct
  misc_feature 1..22: note = chemically synthesized
  source 1..22: mol_type = other DNA
cttctctggtggaagtttggaa

SEQ ID NO: 59089 - DNA, 22 bp, synthetic construct
  misc_feature 1..22: note = chemically synthesized
  source 1..22: mol_type = other DNA
ttctctggtggaagtttggaac

SEQ ID NO: 59090 - DNA, 22 bp, synthetic construct
  misc_feature 1..22: note = chemically synthesized
  source 1..22: mol_type = other DNA
ctctggtggaagtttggaacag

SEQ ID NO: 59091 - DNA, 22 bp, synthetic construct
  misc_feature 1..22: note = chemically synthesized
  source 1..22: mol_type = other DNA
tctggtggaagtttggaacagg

SEQ ID NO: 59092 - DNA, 22 bp, synthetic construct
  misc_feature 1..22: note = chemically synthesized
  source 1..22: mol_type = other DNA
tggtggaagtttggaacaggag

SEQ ID NO: 59093 - DNA, 22 bp, synthetic construct
  misc_feature 1..22: note = chemically synthesized
  source 1..22: mol_type = other DNA
gtggaagtttggaacaggagcc

SEQ ID NO: 59094 - DNA, 22 bp, synthetic construct
  misc_feature 1..22: note = chemically synthesized
  source 1..22: mol_type = other DNA
ggaacaggagcctcctcaagtt

SEQ ID NO: 59095 - DNA, 22 bp, synthetic construct
  misc_feature 1..22: note = chemically synthesized
  source 1..22: mol_type = other DNA
gaacaggagcctcctcaagttc

SEQ ID NO: 59096 - DNA, 22 bp, synthetic construct
  misc_feature 1..22: note = chemically synthesized
  source 1..22: mol_type = other DNA
ctcaagttcatttattcattca

SEQ ID NO: 59097 - DNA, 22 bp, synthetic construct
  misc_feature 1..22: note = chemically synthesized
  source 1..22: mol_type = other DNA
aagttcatttattcattcattc

SEQ ID NO: 59098 - DNA, 22 bp, synthetic construct
  misc_feature 1..22: note = chemically synthesized
  source 1..22: mol_type = other DNA
atttattcattcattcaatggt

SEQ ID NO: 59099 - DNA, 22 bp, synthetic construct
  misc_feature 1..22: note = chemically synthesized
  source 1..22: mol_type = other DNA
attcattcattcaatggttatt

SEQ ID NO: 59100 - DNA, 22 bp, synthetic construct
  misc_feature 1..22: note = chemically synthesized
  source 1..22: mol_type = other DNA
ttcattcattcaatggttattt

SEQ ID NO: 59101 - DNA, 22 bp, synthetic construct
  misc_feature 1..22: note = chemically synthesized
  source 1..22: mol_type = other DNA
attcattcaatggttattttgt

SEQ ID NO: 59102 - DNA, 22 bp, synthetic construct
  misc_feature 1..22: note = chemically synthesized
  source 1..22: mol_type = other DNA
attcaatggttattttgtggga

SEQ ID NO: 59103 - DNA, 22 bp, synthetic construct
  misc_feature 1..22: note = chemically synthesized
  source 1..22: mol_type = other DNA
aatggttattttgtgggaatcg

SEQ ID NO: 59104 - DNA, 22 bp, synthetic construct
  misc_feature 1..22: note = chemically synthesized
  source 1..22: mol_type = other DNA
ttttgtgggaatcgaatttaga

SEQ ID NO: 59105 - DNA, 22 bp, synthetic construct
  misc_feature 1..22: note = chemically synthesized
  source 1..22: mol_type = other DNA
tgtgggaatcgaatttagaatg

SEQ ID NO: 59106 - DNA, 22 bp, synthetic construct
  misc_feature 1..22: note = chemically synthesized
  source 1..22: mol_type = other DNA
gtgggaatcgaatttagaatga

SEQ ID NO: 59107 - DNA, 22 bp, synthetic construct
  misc_feature 1..22: note = chemically synthesized
  source 1..22: mol_type = other DNA
tgggaatcgaatttagaatgaa

SEQ ID NO: 59108 - DNA, 22 bp, synthetic construct
  misc_feature 1..22: note = chemically synthesized
  source 1..22: mol_type = other DNA
agaatgaaaatattttttggca

SEQ ID NO: 59109 - DNA, 22 bp, synthetic construct
  misc_feature 1..22: note = chemically synthesized
  source 1..22: mol_type = other DNA
gaatgaaaatattttttggcaa

SEQ ID NO: 59110 - DNA, 22 bp, synthetic construct
  misc_feature 1..22: note = chemically synthesized
  source 1..22: mol_type = other DNA
tttggcaagcagaaaataattt

SEQ ID NO: 59111 - DNA, 22 bp, synthetic construct
  misc_feature 1..22: note = chemically synthesized
  source 1..22: mol_type = other DNA
ttggcaagcagaaaataatttt

SEQ ID NO: 59112 - DNA, 22 bp, synthetic construct
  misc_feature 1..22: note = chemically synthesized
  source 1..22: mol_type = other DNA
tggcaagcagaaaataattttt

SEQ ID NO: 59113 - DNA, 22 bp, synthetic construct
  misc_feature 1..22: note = chemically synthesized
  source 1..22: mol_type = other DNA
ggcaagcagaaaataattttta

SEQ ID NO: 59114 - DNA, 22 bp, synthetic construct
  misc_feature 1..22: note = chemically synthesized
  source 1..22: mol_type = other DNA
gcaagcagaaaataatttttag

SEQ ID NO: 59115 - DNA, 22 bp, synthetic construct
  misc_feature 1..22: note = chemically synthesized
  source 1..22: mol_type = other DNA
ttagaccaatccttttctttta

SEQ ID NO: 59116 - DNA, 22 bp, synthetic construct
  misc_feature 1..22: note = chemically synthesized
  source 1..22: mol_type = other DNA
tagaccaatccttttcttttag

SEQ ID NO: 59117 - DNA, 22 bp, synthetic construct
  misc_feature 1..22: note = chemically synthesized
  source 1..22: mol_type = other DNA
agaccaatccttttcttttagt

SEQ ID NO: 59118 - DNA, 22 bp, synthetic construct
  misc_feature 1..22: note = chemically synthesized
  source 1..22: mol_type = other DNA
gaccaatccttttcttttagtc

SEQ ID NO: 59119 - DNA, 22 bp, synthetic construct
  misc_feature 1..22: note = chemically synthesized
  source 1..22: mol_type = other DNA
ttcttttagtcatgagaaactg

SEQ ID NO: 59120 - DNA, 22 bp, synthetic construct
  misc_feature 1..22: note = chemically synthesized
  source 1..22: mol_type = other DNA
tcttttagtcatgagaaactga

SEQ ID NO: 59121 - DNA, 22 bp, synthetic construct
  misc_feature 1..22: note = chemically synthesized
  source 1..22: mol_type = other DNA
cttttagtcatgagaaactgag

SEQ ID NO: 59122 - DNA, 22 bp, synthetic construct
  misc_feature 1..22: note = chemically synthesized
  source 1..22: mol_type = other DNA
ttttagtcatgagaaactgagg

SEQ ID NO: 59123 - DNA, 22 bp, synthetic construct
  misc_feature 1..22: note = chemically synthesized
  source 1..22: mol_type = other DNA
ttagtcatgagaaactgaggcc

SEQ ID NO: 59124 - DNA, 22 bp, synthetic construct
  misc_feature 1..22: note = chemically synthesized
  source 1..22: mol_type = other DNA
tagtcatgagaaactgaggccc

SEQ ID NO: 59125 - DNA, 22 bp, synthetic construct
  misc_feature 1..22: note = chemically synthesized
  source 1..22: mol_type = other DNA
agtcatgagaaactgaggccca

SEQ ID NO: 59126 - DNA, 22 bp, synthetic construct
  misc_feature 1..22: note = chemically synthesized
  source 1..22: mol_type = other DNA
gtcatgagaaactgaggcccag

SEQ ID NO: 59127 - DNA, 22 bp, synthetic construct
  misc_feature 1..22: note = chemically synthesized
  source 1..22: mol_type = other DNA
aggcccagagagaggaggtcac

SEQ ID NO: 59128 - DNA, 22 bp, synthetic construct
  misc_feature 1..22: note = chemically synthesized
  source 1..22: mol_type = other DNA
gaactgggtttccagaactgac

SEQ ID NO: 59129 - DNA, 22 bp, synthetic construct
  misc_feature 1..22: note = chemically synthesized
  source 1..22: mol_type = other DNA
ggtttccagaactgacactcca

SEQ ID NO: 59130 - DNA, 22 bp, synthetic construct
  misc_feature 1..22: note = chemically synthesized
  source 1..22: mol_type = other DNA
ccagaactgacactccactgca

SEQ ID NO: 59131 - DNA, 22 bp, synthetic construct
  misc_feature 1..22: note = chemically synthesized
  source 1..22: mol_type = other DNA
cagaactgacactccactgcac

SEQ ID NO: 59132 - DNA, 22 bp, synthetic construct
  misc_feature 1..22: note = chemically synthesized
  source 1..22: mol_type = other DNA
acactccactgcacagagtact

SEQ ID NO: 59133 - DNA, 22 bp, synthetic construct
  misc_feature 1..22: note = chemically synthesized
  source 1..22: mol_type = other DNA
cactgcacagagtactctccca

SEQ ID NO: 59134 - DNA, 22 bp, synthetic construct
  misc_feature 1..22: note = chemically synthesized
  source 1..22: mol_type = other DNA
cacagagtactctcccaattca

SEQ ID NO: 59135 - DNA, 22 bp, synthetic construct
  misc_feature 1..22: note = chemically synthesized
  source 1..22: mol_type = other DNA
tcccaattcattcaatttttat

SEQ ID NO: 59136 - DNA, 22 bp, synthetic construct
  misc_feature 1..22: note = chemically synthesized
  source 1..22: mol_type = other DNA
ccaattcattcaatttttattt

SEQ ID NO: 59137 - DNA, 22 bp, synthetic construct
  misc_feature 1..22: note = chemically synthesized
  source 1..22: mol_type = other DNA
attcaatttttatttagcggaa

SEQ ID NO: 59138 - DNA, 22 bp, synthetic construct
  misc_feature 1..22: note = chemically synthesized
  source 1..22: mol_type = other DNA
aatttttatttagcggaaggca

SEQ ID NO: 59139 - DNA, 22 bp, synthetic construct
  misc_feature 1..22: note = chemically synthesized
  source 1..22: mol_type = other DNA
ttatttagcggaaggcattttc

SEQ ID NO: 59140 - DNA, 22 bp, synthetic construct
  misc_feature 1..22: note = chemically synthesized
  source 1..22: mol_type = other DNA
tatttagcggaaggcattttca

SEQ ID NO: 59141 - DNA, 22 bp, synthetic construct
  misc_feature 1..22: note = chemically synthesized
  source 1..22: mol_type = other DNA
atttagcggaaggcattttcag

SEQ ID NO: 59142 - DNA, 22 bp, synthetic construct
  misc_feature 1..22: note = chemically synthesized
  source 1..22: mol_type = other DNA
tttagcggaaggcattttcaga

SEQ ID NO: 59143 - DNA, 22 bp, synthetic construct
  misc_feature 1..22: note = chemically synthesized
  source 1..22: mol_type = other DNA
agcggaaggcattttcagatgg

SEQ ID NO: 59144 - DNA, 22 bp, synthetic construct
  misc_feature 1..22: note = chemically synthesized
  source 1..22: mol_type = other DNA
gcggaaggcattttcagatggg

SEQ ID NO: 59145 - DNA, 22 bp, synthetic construct
  misc_feature 1..22: note = chemically synthesized
  source 1..22: mol_type = other DNA
tcagatgggtctttgaagcatt

SEQ ID NO: 59146 - DNA, 22 bp, synthetic construct
  misc_feature 1..22: note = chemically synthesized
  source 1..22: mol_type = other DNA
cagatgggtctttgaagcatta

SEQ ID NO: 59147 - DNA, 22 bp, synthetic construct
  misc_feature 1..22: note = chemically synthesized
  source 1..22: mol_type = other DNA
agatgggtctttgaagcattag

SEQ ID NO: 59148 - DNA, 22 bp, synthetic construct
  misc_feature 1..22: note = chemically synthesized
  source 1..22: mol_type = other DNA
tgaagcattagtaggagttcag

SEQ ID NO: 59149 - DNA, 22 bp, synthetic construct
  misc_feature 1..22: note = chemically synthesized
  source 1..22: mol_type = other DNA
gaagcattagtaggagttcagc

SEQ ID NO: 59150 - DNA, 22 bp, synthetic construct
  misc_feature 1..22: note = chemically synthesized
  source 1..22: mol_type = other DNA
aagcattagtaggagttcagcg

SEQ ID NO: 59151 - DNA, 22 bp, synthetic construct
  misc_feature 1..22: note = chemically synthesized
  source 1..22: mol_type = other DNA
gtaggagttcagcgatgatggt

SEQ ID NO: 59152 - DNA, 22 bp, synthetic construct
  misc_feature 1..22: note = chemically synthesized
  source 1..22: mol_type = other DNA
agcgatgatggtgtcatgagaa

SEQ ID NO: 59153 - DNA, 22 bp, synthetic construct
  misc_feature 1..22: note = chemically synthesized
  source 1..22: mol_type = other DNA
tattctaggattaggaggtacc

SEQ ID NO: 59154 - DNA, 22 bp, synthetic construct
  misc_feature 1..22: note = chemically synthesized
  source 1..22: mol_type = other DNA
attctaggattaggaggtacca

SEQ ID NO: 59155 - DNA, 22 bp, synthetic construct
  misc_feature 1..22: note = chemically synthesized
  source 1..22: mol_type = other DNA
ttctaggattaggaggtaccat

SEQ ID NO: 59156 - DNA, 22 bp, synthetic construct
  misc_feature 1..22: note = chemically synthesized
  source 1..22: mol_type = other DNA
taggattaggaggtaccatgaa

SEQ ID NO: 59157 - DNA, 22 bp, synthetic construct
  misc_feature 1..22: note = chemically synthesized
  source 1..22: mol_type = other DNA
ggattaggaggtaccatgaaca

SEQ ID NO: 59158 - DNA, 22 bp, synthetic construct
  misc_feature 1..22: note = chemically synthesized
  source 1..22: mol_type = other DNA
ggaggtaccatgaacaaagata

SEQ ID NO: 59159 - DNA, 22 bp, synthetic construct
  misc_feature 1..22: note = chemically synthesized
  source 1..22: mol_type = other DNA
ggaaaaccagaggtggaagata

SEQ ID NO: 59160 - DNA, 22 bp, synthetic construct
  misc_feature 1..22: note = chemically synthesized
  source 1..22: mol_type = other DNA
tttttcttttttttttgagatg

SEQ ID NO: 59161 - DNA, 22 bp, synthetic construct
  misc_feature 1..22: note = chemically synthesized
  source 1..22: mol_type = other DNA
tttcttttttttttgagatgga

SEQ ID NO: 59162 - DNA, 22 bp, synthetic construct
  misc_feature 1..22: note = chemically synthesized
  source 1..22: mol_type = other DNA
ttcttttttttttgagatggag

SEQ ID NO: 59163 - DNA, 22 bp, synthetic construct
  misc_feature 1..22: note = chemically synthesized
  source 1..22: mol_type = other DNA
tcttttttttttgagatggagt

SEQ ID NO: 59164 - DNA, 22 bp, synthetic construct
  misc_feature 1..22: note = chemically synthesized
  source 1..22: mol_type = other DNA
cttttttttttgagatggagtt

SEQ ID NO: 59165 - DNA, 22 bp, synthetic construct
  misc_feature 1..22: note = chemically synthesized
  source 1..22: mol_type = other DNA
ttttttttttgagatggagttt

SEQ ID NO: 59166 - DNA, 22 bp, synthetic construct
  misc_feature 1..22: note = chemically synthesized
  source 1..22: mol_type = other DNA
ttttttttgagatggagtttcg

SEQ ID NO: 59167 - DNA, 22 bp, synthetic construct
  misc_feature 1..22: note = chemically synthesized
  source 1..22: mol_type = other DNA
tttttttgagatggagtttcgc

SEQ ID NO: 59168 - DNA, 22 bp, synthetic construct
  misc_feature 1..22: note = chemically synthesized
  source 1..22: mol_type = other DNA
ttttttgagatggagtttcgct

SEQ ID NO: 59169 - DNA, 22 bp, synthetic construct
  misc_feature 1..22: note = chemically synthesized
  source 1..22: mol_type = other DNA
tttttgagatggagtttcgctc

SEQ ID NO: 59170 - DNA, 22 bp, synthetic construct
  misc_feature 1..22: note = chemically synthesized
  source 1..22: mol_type = other DNA
ttttgagatggagtttcgctct

SEQ ID NO: 59171 - DNA, 22 bp, synthetic construct
  misc_feature 1..22: note = chemically synthesized
  source 1..22: mol_type = other DNA
tttgagatggagtttcgctctt

SEQ ID NO: 59172 - DNA, 22 bp, synthetic construct
  misc_feature 1..22: note = chemically synthesized
  source 1..22: mol_type = other DNA
ttgagatggagtttcgctcttg

SEQ ID NO: 59173 - DNA, 22 bp, synthetic construct
  misc_feature 1..22: note = chemically synthesized
  source 1..22: mol_type = other DNA
tgagatggagtttcgctcttgt

SEQ ID NO: 59174 - DNA, 22 bp, synthetic construct
  misc_feature 1..22: note = chemically synthesized
  source 1..22: mol_type = other DNA
gagatggagtttcgctcttgtt

SEQ ID NO: 59175 - DNA, 22 bp, synthetic construct
  misc_feature 1..22: note = chemically synthesized
  source 1..22: mol_type = other DNA
agatggagtttcgctcttgttg

SEQ ID NO: 59176 - DNA, 22 bp, synthetic construct
  misc_feature 1..22: note = chemically synthesized
  source 1..22: mol_type = other DNA
cgctcttgttgcccaggctgga

SEQ ID NO: 59177 - DNA, 22 bp, synthetic construct
  misc_feature 1..22: note = chemically synthesized
  source 1..22: mol_type = other DNA
gctcttgttgcccaggctggag

SEQ ID NO: 59178 - DNA, 22 bp, synthetic construct
  misc_feature 1..22: note = chemically synthesized
  source 1..22: mol_type = other DNA
ttgttgcccaggctggagtgca

SEQ ID NO: 59179 - DNA, 22 bp, synthetic construct
  misc_feature 1..22: note = chemically synthesized
  source 1..22: mol_type = other DNA
gttgcccaggctggagtgcaat

SEQ ID NO: 59180 - DNA, 22 bp, synthetic construct
  misc_feature 1..22: note = chemically synthesized
  source 1..22: mol_type = other DNA
ttgcccaggctggagtgcaatg

SEQ ID NO: 59181 - DNA, 22 bp, synthetic construct
  misc_feature 1..22: note = chemically synthesized
  source 1..22: mol_type = other DNA
cccaggctggagtgcaatggtg

SEQ ID NO: 59182 - DNA, 22 bp, synthetic construct
  misc_feature 1..22: note = chemically synthesized
  source 1..22: mol_type = other DNA
gagtgcaatggtgcagtctcag

SEQ ID NO: 59183 - DNA, 22 bp, synthetic construct
  misc_feature 1..22: note = chemically synthesized
  source 1..22: mol_type = other DNA
agctcactgcaacatctgtctc

SEQ ID NO: 59184 - DNA, 22 bp, synthetic construct
  misc_feature 1..22: note = chemically synthesized
  source 1..22: mol_type = other DNA
actgcaacatctgtctcccggg

SEQ ID NO: 59185 - DNA, 22 bp, synthetic construct
  misc_feature 1..22: note = chemically synthesized
  source 1..22: mol_type = other DNA
caacatctgtctcccgggttca

SEQ ID NO: 59186 - DNA, 22 bp, synthetic construct
  misc_feature 1..22: note = chemically synthesized
  source 1..22: mol_type = other DNA
tctcccgggttcaagtggttct

SEQ ID NO: 59187 - DNA, 22 bp, synthetic construct
  misc_feature 1..22: note = chemically synthesized
  source 1..22: mol_type = other DNA
ccgggttcaagtggttctcctg

SEQ ID NO: 59188 - DNA, 22 bp, synthetic construct
  misc_feature 1..22: note = chemically synthesized
  source 1..22: mol_type = other DNA
aagtggttctcctgcctcagcc

SEQ ID NO: 59189 - DNA, 22 bp, synthetic construct
  misc_feature 1..22: note = chemically synthesized
  source 1..22: mol_type = other DNA
tcctgcctcagcctcccaagaa

SEQ ID NO: 59190 - DNA, 22 bp, synthetic construct
  misc_feature 1..22: note = chemically synthesized
  source 1..22: mol_type = other DNA
ctgcctcagcctcccaagaagc

SEQ ID NO: 59191 - DNA, 22 bp, synthetic construct
  misc_feature 1..22: note = chemically synthesized
  source 1..22: mol_type = other DNA
cctcagcctcccaagaagctgg

SEQ ID NO: 59192 - DNA, 22 bp, synthetic construct
  misc_feature 1..22: note = chemically synthesized
  source 1..22: mol_type = other DNA
agcctcccaagaagctgggatt

SEQ ID NO: 59193 - DNA, 22 bp, synthetic construct
  misc_feature 1..22: note = chemically synthesized
  source 1..22: mol_type = other DNA
ccaagaagctgggattacaggt

SEQ ID NO: 59194 - DNA, 22 bp, synthetic construct
  misc_feature 1..22: note = chemically synthesized
  source 1..22: mol_type = other DNA
ggattacaggtacctgccacca

SEQ ID NO: 59195 - DNA, 22 bp, synthetic construct
  misc_feature 1..22: note = chemically synthesized
  source 1..22: mol_type = other DNA
caggtacctgccaccacgcccg

SEQ ID NO: 59196 - DNA, 22 bp, synthetic construct
  misc_feature 1..22: note = chemically synthesized
  source 1..22: mol_type = other DNA
ccaccacgcccggctaattttt

SEQ ID NO: 59197 - DNA, 22 bp, synthetic construct
  misc_feature 1..22: note = chemically synthesized
  source 1..22: mol_type = other DNA
atttttgtatttttagtagaga

SEQ ID NO: 59198 - DNA, 22 bp, synthetic construct
  misc_feature 1..22: note = chemically synthesized
  source 1..22: mol_type = other DNA
ttgtatttttagtagagaaggg

SEQ ID NO: 59199 - DNA, 22 bp, synthetic construct
  misc_feature 1..22: note = chemically synthesized
  source 1..22: mol_type = other DNA
tgtatttttagtagagaagggg

SEQ ID NO: 59200 - DNA, 22 bp, synthetic construct
  misc_feature 1..22: note = chemically synthesized
  source 1..22: mol_type = other DNA
gtatttttagtagagaaggggt

SEQ ID NO: 59201 - DNA, 22 bp, synthetic construct
  misc_feature 1..22: note = chemically synthesized
  source 1..22: mol_type = other DNA
tatttttagtagagaaggggtt

SEQ ID NO: 59202 - DNA, 22 bp, synthetic construct
  misc_feature 1..22: note = chemically synthesized
  source 1..22: mol_type = other DNA
ttagtagagaaggggtttcacc

SEQ ID NO: 59203 - DNA, 22 bp, synthetic construct
  misc_feature 1..22: note = chemically synthesized
  source 1..22: mol_type = other DNA
tagtagagaaggggtttcacca

SEQ ID NO: 59204 - DNA, 22 bp, synthetic construct
  misc_feature 1..22: note = chemically synthesized
  source 1..22: mol_type = other DNA
agtagagaaggggtttcaccac

SEQ ID NO: 59205 - DNA, 22 bp, synthetic construct
  misc_feature 1..22: note = chemically synthesized
  source 1..22: mol_type = other DNA
gtagagaaggggtttcaccacg

SEQ ID NO: 59206 - DNA, 22 bp, synthetic construct
  misc_feature 1..22: note = chemically synthesized
  source 1..22: mol_type = other DNA
caccacgttggccaggctagtc

SEQ ID NO: 59207 - DNA, 22 bp, synthetic construct
  misc_feature 1..22: note = chemically synthesized
  source 1..22: mol_type = other DNA
accacgttggccaggctagtcg

SEQ ID NO: 59208 - DNA, 22 bp, synthetic construct
  misc_feature 1..22: note = chemically synthesized
  source 1..22: mol_type = other DNA
gccaggctagtcgcaaactcct

SEQ ID NO: 59209 - DNA, 22 bp, synthetic construct
  misc_feature 1..22: note = chemically synthesized
  source 1..22: mol_type = other DNA
gtcgcaaactcctgacctcctc

SEQ ID NO: 59210 - DNA, 22 bp, synthetic construct
  misc_feature 1..22: note = chemically synthesized
  source 1..22: mol_type = other DNA
ctgacctcctcagtggatccga

SEQ ID NO: 59211 - DNA, 22 bp, synthetic construct
  misc_feature 1..22: note = chemically synthesized
  source 1..22: mol_type = other DNA
acctcctcagtggatccgagga

SEQ ID NO: 59212 - DNA, 22 bp, synthetic construct
  misc_feature 1..22: note = chemically synthesized
  source 1..22: mol_type = other DNA
ctcagtggatccgaggaggtga

SEQ ID NO: 59213 - DNA, 22 bp, synthetic construct
  misc_feature 1..22: note = chemically synthesized
  source 1..22: mol_type = other DNA
agtggatccgaggaggtgatcc

SEQ ID NO: 59214 - DNA, 22 bp, synthetic construct
  misc_feature 1..22: note = chemically synthesized
  source 1..22: mol_type = other DNA
ccgcctcagcctcccaaagtgc

SEQ ID NO: 59215 - DNA, 22 bp, synthetic construct
  misc_feature 1..22: note = chemically synthesized
  source 1..22: mol_type = other DNA
agcctcccaaagtgctcgaatt

SEQ ID NO: 59216 - DNA, 22 bp, synthetic construct
  misc_feature 1..22: note = chemically synthesized
  source 1..22: mol_type = other DNA
ccaaagtgctcgaattacaggt

SEQ ID NO: 59217 - DNA, 22 bp, synthetic construct
  misc_feature 1..22: note = chemically synthesized
  source 1..22: mol_type = other DNA
gaattacaggtgtgagccacca

SEQ ID NO: 59218 - DNA, 22 bp, synthetic construct
  misc_feature 1..22: note = chemically synthesized
  source 1..22: mol_type = other DNA
caggtgtgagccaccacgcctg

SEQ ID NO: 59219 - DNA, 22 bp, synthetic construct
  misc_feature 1..22: note = chemically synthesized
  source 1..22: mol_type = other DNA
gcctccacagttctttatccac

SEQ ID NO: 59220 - DNA, 22 bp, synthetic construct
  misc_feature 1..22: note = chemically synthesized
  source 1..22: mol_type = other DNA
cacagttctttatccaccgtct

SEQ ID NO: 59221 - DNA, 22 bp, synthetic construct
  misc_feature 1..22: note = chemically synthesized
  source 1..22: mol_type = other DNA
tttatccaccgtctgaaatgta

SEQ ID NO: 59222 - DNA, 22 bp, synthetic construct
  misc_feature 1..22: note = chemically synthesized
  source 1..22: mol_type = other DNA
tatccaccgtctgaaatgtaaa

SEQ ID NO: 59223 - DNA, 22 bp, synthetic construct
  misc_feature 1..22: note = chemically synthesized
  source 1..22: mol_type = other DNA
atccaccgtctgaaatgtaaaa

SEQ ID NO: 59224 - DNA, 22 bp, synthetic construct
  misc_feature 1..22: note = chemically synthesized
  source 1..22: mol_type = other DNA
tccaccgtctgaaatgtaaaat

SEQ ID NO: 59225 - DNA, 22 bp, synthetic construct
  misc_feature 1..22: note = chemically synthesized
  source 1..22: mol_type = other DNA
aaatgtaaaatgttacgaaaac

SEQ ID NO: 59226 - DNA, 22 bp, synthetic construct
  misc_feature 1..22: note = chemically synthesized
  source 1..22: mol_type = other DNA
cgaaaaccaaaagttttttttg

SEQ ID NO: 59227 - DNA, 22 bp, synthetic construct
  misc_feature 1..22: note = chemically synthesized
  source 1..22: mol_type = other DNA
tttttgtgatttatttgatggt

SEQ ID NO: 59228 - DNA, 22 bp, synthetic construct
  misc_feature 1..22: note = chemically synthesized
  source 1..22: mol_type = other DNA
ttttgtgatttatttgatggta

SEQ ID NO: 59229 - DNA, 22 bp, synthetic construct
  misc_feature 1..22: note = chemically synthesized
  source 1..22: mol_type = other DNA
tttgtgatttatttgatggtag

SEQ ID NO: 59230 - DNA, 22 bp, synthetic construct
  misc_feature 1..22: note = chemically synthesized
  source 1..22: mol_type = other DNA
ttgtgatttatttgatggtagc

SEQ ID NO: 59231 - DNA, 22 bp, synthetic construct
  misc_feature 1..22: note = chemically synthesized
  source 1..22: mol_type = other DNA
tgtgatttatttgatggtagca

SEQ ID NO: 59232 - DNA, 22 bp, synthetic construct
  misc_feature 1..22: note = chemically synthesized
  source 1..22: mol_type = other DNA
gtgatttatttgatggtagcac

SEQ ID NO: 59233 - DNA, 22 bp, synthetic construct
  misc_feature 1..22: note = chemically synthesized
  source 1..22: mol_type = other DNA
tgatttatttgatggtagcacc

SEQ ID NO: 59234 - DNA, 22 bp, synthetic construct
  misc_feature 1..22: note = chemically synthesized
  source 1..22: mol_type = other DNA
atttgatggtagcacctgacgt

SEQ ID NO: 59235 - DNA, 22 bp, synthetic construct
  misc_feature 1..22: note = chemically synthesized
  source 1..22: mol_type = other DNA
tttgatggtagcacctgacgtg

SEQ ID NO: 59236 - DNA, 22 bp, synthetic construct
  misc_feature 1..22: note = chemically synthesized
  source 1..22: mol_type = other DNA
gatggtagcacctgacgtgaac

SEQ ID NO: 59237 - DNA, 22 bp, synthetic construct
  misc_feature 1..22: note = chemically synthesized
  source 1..22: mol_type = other DNA
atggtagcacctgacgtgaact

SEQ ID NO: 59238 - DNA, 22 bp, synthetic construct
  misc_feature 1..22: note = chemically synthesized
  source 1..22: mol_type = other DNA
acgtgaactgacatgagattat

SEQ ID NO: 59239 - DNA, 22 bp, synthetic construct
  misc_feature 1..22: note = chemically synthesized
  source 1..22: mol_type = other DNA
acatgagattatttttaattta

SEQ ID NO: 59240 - DNA, 22 bp, synthetic construct
  misc_feature 1..22: note = chemically synthesized
  source 1..22: mol_type = other DNA
tttttaatttagttgtgtgaat

SEQ ID NO: 59241 - DNA, 22 bp, synthetic construct
  misc_feature 1..22: note = chemically synthesized
  source 1..22: mol_type = other DNA
ttaatttagttgtgtgaatatg

SEQ ID NO: 59242 - DNA, 22 bp, synthetic construct
  misc_feature 1..22: note = chemically synthesized
  source 1..22: mol_type = other DNA
taatttagttgtgtgaatatgc

SEQ ID NO: 59243 - DNA, 22 bp, synthetic construct
  misc_feature 1..22: note = chemically synthesized
  source 1..22: mol_type = other DNA
aatttagttgtgtgaatatgca

SEQ ID NO: 59244 - DNA, 22 bp, synthetic construct
  misc_feature 1..22: note = chemically synthesized
  source 1..22: mol_type = other DNA
atttagttgtgtgaatatgcat

SEQ ID NO: 59245 - DNA, 22 bp, synthetic construct
  misc_feature 1..22: note = chemically synthesized
  source 1..22: mol_type = other DNA
agttgtgtgaatatgcatattc

SEQ ID NO: 59246 - DNA, 22 bp, synthetic construct
  misc_feature 1..22: note = chemically synthesized
  source 1..22: mol_type = other DNA
gttgtgtgaatatgcatattca

SEQ ID NO: 59247 - DNA, 22 bp, synthetic construct
  misc_feature 1..22: note = chemically synthesized
  source 1..22: mol_type = other DNA
tgtgaatatgcatattcatata

SEQ ID NO: 59248 - DNA, 22 bp, synthetic construct
  misc_feature 1..22: note = chemically synthesized
  source 1..22: mol_type = other DNA
atatattttgctgcatagatta

SEQ ID NO: 59249 - DNA, 22 bp, synthetic construct
  misc_feature 1..22: note = chemically synthesized
  source 1..22: mol_type = other DNA
tgctgcatagattacagtatgc

SEQ ID NO: 59250 - DNA, 22 bp, synthetic construct
  misc_feature 1..22: note = chemically synthesized
  source 1..22: mol_type = other DNA
gctgcatagattacagtatgca

SEQ ID NO: 59251 - DNA, 22 bp, synthetic construct
  misc_feature 1..22: note = chemically synthesized
  source 1..22: mol_type = other DNA
ctgcatagattacagtatgcag

SEQ ID NO: 59252 - DNA, 22 bp, synthetic construct
  misc_feature 1..22: note = chemically synthesized
  source 1..22: mol_type = other DNA
catagattacagtatgcagctc

SEQ ID NO: 59253 - DNA, 22 bp, synthetic construct
  misc_feature 1..22: note = chemically synthesized
  source 1..22: mol_type = other DNA
cagtatgcagctccagattctt

SEQ ID NO: 59254 - DNA, 22 bp, synthetic construct
  misc_feature 1..22: note = chemically synthesized
  source 1..22: mol_type = other DNA
cagattcttccaagcagactct

SEQ ID NO: 59255 - DNA, 22 bp, synthetic construct
  misc_feature 1..22: note = chemically synthesized
  source 1..22: mol_type = other DNA
ttccaagcagactctgattgcc

SEQ ID NO: 59256 - DNA, 22 bp, synthetic construct
  misc_feature 1..22: note = chemically synthesized
  source 1..22: mol_type = other DNA
ccaagcagactctgattgccca

SEQ ID NO: 59257 - DNA, 22 bp, synthetic construct
  misc_feature 1..22: note = chemically synthesized
  source 1..22: mol_type = other DNA
caagcagactctgattgcccat

SEQ ID NO: 59258 - DNA, 22 bp, synthetic construct
  misc_feature 1..22: note = chemically synthesized
  source 1..22: mol_type = other DNA
tgattgcccattactgcctttc

SEQ ID NO: 59259 - DNA, 22 bp, synthetic construct
  misc_feature 1..22: note = chemically synthesized
  source 1..22: mol_type = other DNA
attgcccattactgcctttcta

SEQ ID NO: 59260 - DNA, 22 bp, synthetic construct
  misc_feature 1..22: note = chemically synthesized
  source 1..22: mol_type = other DNA
cccattactgcctttctaaaat

SEQ ID NO: 59261 - DNA, 22 bp, synthetic construct
  misc_feature 1..22: note = chemically synthesized
  source 1..22: mol_type = other DNA
ctgcctttctaaaatccaaaca

SEQ ID NO: 59262 - DNA, 22 bp, synthetic construct
  misc_feature 1..22: note = chemically synthesized
  source 1..22: mol_type = other DNA
cctttctaaaatccaaacaagt

SEQ ID NO: 59263 - DNA, 22 bp, synthetic construct
  misc_feature 1..22: note = chemically synthesized
  source 1..22: mol_type = other DNA
tctaaaatccaaacaagttctg

SEQ ID NO: 59264 - DNA, 22 bp, synthetic construct
  misc_feature 1..22: note = chemically synthesized
  source 1..22: mol_type = other DNA
ctaaaatccaaacaagttctga

SEQ ID NO: 59265 - DNA, 22 bp, synthetic construct
  misc_feature 1..22: note = chemically synthesized
  source 1..22: mol_type = other DNA
taaaatccaaacaagttctgag

SEQ ID NO: 59266 - DNA, 22 bp, synthetic construct
  misc_feature 1..22: note = chemically synthesized
  source 1..22: mol_type = other DNA
aaatccaaacaagttctgaggt

SEQ ID NO: 59267 - DNA, 22 bp, synthetic construct
  misc_feature 1..22: note = chemically synthesized
  source 1..22: mol_type = other DNA
tgaggttcaaaaccgttttggc

SEQ ID NO: 59268 - DNA, 22 bp, synthetic construct
  misc_feature 1..22: note = chemically synthesized
  source 1..22: mol_type = other DNA
aggttcaaaaccgttttggccc

SEQ ID NO: 59269 - DNA, 22 bp, synthetic construct
  misc_feature 1..22: note = chemically synthesized
  source 1..22: mol_type = other DNA
aaaaccgttttggccctaaggc

SEQ ID NO: 59270 - DNA, 22 bp, synthetic construct
  misc_feature 1..22: note = chemically synthesized
  source 1..22: mol_type = other DNA
tggccctaaggctttgggtaaa

SEQ ID NO: 59271 - DNA, 22 bp, synthetic construct
  misc_feature 1..22: note = chemically synthesized
  source 1..22: mol_type = other DNA
ggccctaaggctttgggtaaag

SEQ ID NO: 59272 - DNA, 22 bp, synthetic construct
  misc_feature 1..22: note = chemically synthesized
  source 1..22: mol_type = other DNA
gccctaaggctttgggtaaagg

SEQ ID NO: 59273 - DNA, 22 bp, synthetic construct
  misc_feature 1..22: note = chemically synthesized
  source 1..22: mol_type = other DNA
aggctttgggtaaagggggtgg

SEQ ID NO: 59274 - DNA, 22 bp, synthetic construct
  misc_feature 1..22: note = chemically synthesized
  source 1..22: mol_type = other DNA
tgggtaaagggggtggactctg

SEQ ID NO: 59275 - DNA, 22 bp, synthetic construct
  misc_feature 1..22: note = chemically synthesized
  source 1..22: mol_type = other DNA
gggtaaagggggtggactctgt

SEQ ID NO: 59276 - DNA, 22 bp, synthetic construct
  misc_feature 1..22: note = chemically synthesized
  source 1..22: mol_type = other DNA
ggtaaagggggtggactctgtt

SEQ ID NO: 59277 - DNA, 22 bp, synthetic construct
  misc_feature 1..22: note = chemically synthesized
  source 1..22: mol_type = other DNA
tgttctactctgactggagtcc

SEQ ID NO: 59278 - DNA, 22 bp, synthetic construct
  misc_feature 1..22: note = chemically synthesized
  source 1..22: mol_type = other DNA
ttctactctgactggagtccaa

SEQ ID NO: 59279 - DNA, 22 bp, synthetic construct
  misc_feature 1..22: note = chemically synthesized
  source 1..22: mol_type = other DNA
tactctgactggagtccaagat

SEQ ID NO: 59280 - DNA, 22 bp, synthetic construct
  misc_feature 1..22: note = chemically synthesized
  source 1..22: mol_type = other DNA
ctctgactggagtccaagatgc

SEQ ID NO: 59281 - DNA, 22 bp, synthetic construct
  misc_feature 1..22: note = chemically synthesized
  source 1..22: mol_type = other DNA
tgactggagtccaagatgcata

SEQ ID NO: 59282 - DNA, 22 bp, synthetic construct
  misc_feature 1..22: note = chemically synthesized
  source 1..22: mol_type = other DNA
actggagtccaagatgcatata

SEQ ID NO: 59283 - DNA, 22 bp, synthetic construct
  misc_feature 1..22: note = chemically synthesized
  source 1..22: mol_type = other DNA
gagtccaagatgcatatataca

SEQ ID NO: 59284 - DNA, 22 bp, synthetic construct
  misc_feature 1..22: note = chemically synthesized
  source 1..22: mol_type = other DNA
caaggtaggttgaggtaggggc

SEQ ID NO: 59285 - DNA, 22 bp, synthetic construct
  misc_feature 1..22: note = chemically synthesized
  source 1..22: mol_type = other DNA
aggtaggggccaaggaggagca

SEQ ID NO: 59286 - DNA, 22 bp, synthetic construct
  misc_feature 1..22: note = chemically synthesized
  source 1..22: mol_type = other DNA
ggacttgattcatgaggctgtg

SEQ ID NO: 59287 - DNA, 22 bp, synthetic construct
  misc_feature 1..22: note = chemically synthesized
  source 1..22: mol_type = other DNA
gacttgattcatgaggctgtgg

SEQ ID NO: 59288 - DNA, 22 bp, synthetic construct
  misc_feature 1..22: note = chemically synthesized
  source 1..22: mol_type = other DNA
gattcatgaggctgtggggagc

SEQ ID NO: 59289 - DNA, 22 bp, synthetic construct
  misc_feature 1..22: note = chemically synthesized
  source 1..22: mol_type = other DNA
attcatgaggctgtggggagcc

SEQ ID NO: 59290 - DNA, 22 bp, synthetic construct
  misc_feature 1..22: note = chemically synthesized
  source 1..22: mol_type = other DNA
atgaggctgtggggagccagtg

SEQ ID NO: 59291 - DNA, 22 bp, synthetic construct
  misc_feature 1..22: note = chemically synthesized
  source 1..22: mol_type = other DNA
tggggagccagtgaaggttctt

SEQ ID NO: 59292 - DNA, 22 bp, synthetic construct
  misc_feature 1..22: note = chemically synthesized
  source 1..22: mol_type = other DNA
ttaagcaggtatgtctgcctga

SEQ ID NO: 59293 - DNA, 22 bp, synthetic construct
  misc_feature 1..22: note = chemically synthesized
  source 1..22: mol_type = other DNA
aagcaggtatgtctgcctgaga

SEQ ID NO: 59294 - DNA, 22 bp, synthetic construct
  misc_feature 1..22: note = chemically synthesized
  source 1..22: mol_type = other DNA
agcaggtatgtctgcctgagag

SEQ ID NO: 59295 - DNA, 22 bp, synthetic construct
  misc_feature 1..22: note = chemically synthesized
  source 1..22: mol_type = other DNA
cctgagagcagttggagcagac

SEQ ID NO: 59296 - DNA, 22 bp, synthetic construct
  misc_feature 1..22: note = chemically synthesized
  source 1..22: mol_type = other DNA
agagcagttggagcagacaaga

SEQ ID NO: 59297 - DNA, 22 bp, synthetic construct
  misc_feature 1..22: note = chemically synthesized
  source 1..22: mol_type = other DNA
gagcagacaagagctaaaaacc

SEQ ID NO: 59298 - DNA, 22 bp, synthetic construct
  misc_feature 1..22: note = chemically synthesized
  source 1..22: mol_type = other DNA
aaaaccaaacaaatcaccatag

SEQ ID NO: 59299 - DNA, 22 bp, synthetic construct
  misc_feature 1..22: note = chemically synthesized
  source 1..22: mol_type = other DNA
ctataatttgtttgtcccctcc

SEQ ID NO: 59300 - DNA, 22 bp, synthetic construct
  misc_feature 1..22: note = chemically synthesized
  source 1..22: mol_type = other DNA
taatttgtttgtcccctccaaa

SEQ ID NO: 59301 - DNA, 22 bp, synthetic construct
  misc_feature 1..22: note = chemically synthesized
  source 1..22: mol_type = other DNA
gtttgtcccctccaaatctcat

SEQ ID NO: 59302 - DNA, 22 bp, synthetic construct
  misc_feature 1..22: note = chemically synthesized
  source 1..22: mol_type = other DNA
tttgtcccctccaaatctcatg

SEQ ID NO: 59303 - DNA, 22 bp, synthetic construct
  misc_feature 1..22: note = chemically synthesized
  source 1..22: mol_type = other DNA
gtcccctccaaatctcatgtgg

SEQ ID NO: 59304 - DNA, 22 bp, synthetic construct
  misc_feature 1..22: note = chemically synthesized
  source 1..22: mol_type = other DNA
tcccctccaaatctcatgtgga

SEQ ID NO: 59305 - DNA, 22 bp, synthetic construct
  misc_feature 1..22: note = chemically synthesized
  source 1..22: mol_type = other DNA
caaatctcatgtggaaatttgg

SEQ ID NO: 59306 - DNA, 22 bp, synthetic construct
  misc_feature 1..22: note = chemically synthesized
  source 1..22: mol_type = other DNA
atgtggaaatttggtcctcagt

SEQ ID NO: 59307 - DNA, 22 bp, synthetic construct
  misc_feature 1..22: note = chemically synthesized
  source 1..22: mol_type = other DNA
ggtcctcagtgttggaagtggg

SEQ ID NO: 59308 - DNA, 22 bp, synthetic construct
  misc_feature 1..22: note = chemically synthesized
  source 1..22: mol_type = other DNA
gtcctcagtgttggaagtgggg

SEQ ID NO: 59309 - DNA, 22 bp, synthetic construct
  misc_feature 1..22: note = chemically synthesized
  source 1..22: mol_type = other DNA
agtgttggaagtggggcctaat

SEQ ID NO: 59310 - DNA, 22 bp, synthetic construct
  misc_feature 1..22: note = chemically synthesized
  source 1..22: mol_type = other DNA
gaagtggggcctaatgggaggt

SEQ ID NO: 59311 - DNA, 22 bp, synthetic construct
  misc_feature 1..22: note = chemically synthesized
  source 1..22: mol_type = other DNA
atgggaggtgtttgggtcatgg

SEQ ID NO: 59312 - DNA, 22 bp, synthetic construct
  misc_feature 1..22: note = chemically synthesized
  source 1..22: mol_type = other DNA
gggtcatgggggaggaacccct

SEQ ID NO: 59313 - DNA, 22 bp, synthetic construct
  misc_feature 1..22: note = chemically synthesized
  source 1..22: mol_type = other DNA
ggtcatgggggaggaacccctg

SEQ ID NO: 59314 - DNA, 22 bp, synthetic construct
  misc_feature 1..22: note = chemically synthesized
  source 1..22: mol_type = other DNA
tgaaaggcttggtgccgtcctt

SEQ ID NO: 59315 - DNA, 22 bp, synthetic construct
  misc_feature 1..22: note = chemically synthesized
  source 1..22: mol_type = other DNA
ggtgccgtccttgtgataatga

SEQ ID NO: 59316 - DNA, 22 bp, synthetic construct
  misc_feature 1..22: note = chemically synthesized
  source 1..22: mol_type = other DNA
gtgccgtccttgtgataatgag

SEQ ID NO: 59317 - DNA, 22 bp, synthetic construct
  misc_feature 1..22: note = chemically synthesized
  source 1..22: mol_type = other DNA
gtgataatgagtaagttctccc

SEQ ID NO: 59318 - DNA, 22 bp, synthetic construct
  misc_feature 1..22: note = chemically synthesized
  source 1..22: mol_type = other DNA
tgataatgagtaagttctcccg

SEQ ID NO: 59319 - DNA, 22 bp, synthetic construct
  misc_feature 1..22: note = chemically synthesized
  source 1..22: mol_type = other DNA
tcccgctatgatttcccttgaa

SEQ ID NO: 59320 - DNA, 22 bp, synthetic construct
  misc_feature 1..22: note = chemically synthesized
  source 1..22: mol_type = other DNA
ccgctatgatttcccttgaagg

SEQ ID NO: 59321 - DNA, 22 bp, synthetic construct
  misc_feature 1..22: note = chemically synthesized
  source 1..22: mol_type = other DNA
tgatttcccttgaaggctgatt

SEQ ID NO: 59322 - DNA, 22 bp, synthetic construct
  misc_feature 1..22: note = chemically synthesized
  source 1..22: mol_type = other DNA
cccttgaaggctgattattaaa

SEQ ID NO: 59323 - DNA, 22 bp, synthetic construct
  misc_feature 1..22: note = chemically synthesized
  source 1..22: mol_type = other DNA
ccttgaaggctgattattaaaa

SEQ ID NO: 59324 - DNA, 22 bp, synthetic construct
  misc_feature 1..22: note = chemically synthesized
  source 1..22: mol_type = other DNA
gaaggctgattattaaaaagag

SEQ ID NO: 59325 - DNA, 22 bp, synthetic construct
  misc_feature 1..22: note = chemically synthesized
  source 1..22: mol_type = other DNA
aaggctgattattaaaaagagc

SEQ ID NO: 59326 - DNA, 22 bp, synthetic construct
  misc_feature 1..22: note = chemically synthesized
  source 1..22: mol_type = other DNA
attattaaaaagagcttggcac

SEQ ID NO: 59327 - DNA, 22 bp, synthetic construct
  misc_feature 1..22: note = chemically synthesized
  source 1..22: mol_type = other DNA
ttaaaaagagcttggcacctcc

SEQ ID NO: 59328 - DNA, 22 bp, synthetic construct
  misc_feature 1..22: note = chemically synthesized
  source 1..22: mol_type = other DNA
aaaagagcttggcacctccctc

SEQ ID NO: 59329 - DNA, 22 bp, synthetic construct
  misc_feature 1..22: note = chemically synthesized
  source 1..22: mol_type = other DNA
ggcacctccctctcttctctct

SEQ ID NO: 59330 - DNA, 22 bp, synthetic construct
  misc_feature 1..22: note = chemically synthesized
  source 1..22: mol_type = other DNA
gcacctccctctcttctctctt

SEQ ID NO: 59331 - DNA, 22 bp, synthetic construct
  misc_feature 1..22: note = chemically synthesized
  source 1..22: mol_type = other DNA
cctctcttctctcttgcttctt

SEQ ID NO: 59332 - DNA, 22 bp, synthetic construct
  misc_feature 1..22: note = chemically synthesized
  source 1..22: mol_type = other DNA
tcttctctcttgcttcttctct

SEQ ID NO: 59333 - DNA, 22 bp, synthetic construct
  misc_feature 1..22: note = chemically synthesized
  source 1..22: mol_type = other DNA
ttctctcttgcttcttctcttg

SEQ ID NO: 59334 - DNA, 22 bp, synthetic construct
  misc_feature 1..22: note = chemically synthesized
  source 1..22: mol_type = other DNA
ctctcttgcttcttctcttgcc

SEQ ID NO: 59335 - DNA, 22 bp, synthetic construct
  misc_feature 1..22: note = chemically synthesized
  source 1..22: mol_type = other DNA
tctcttgcttcttctcttgcca

SEQ ID NO: 59336 - DNA, 22 bp, synthetic construct
  misc_feature 1..22: note = chemically synthesized
  source 1..22: mol_type = other DNA
tcttgcttcttctcttgccatg

SEQ ID NO: 59337 - DNA, 22 bp, synthetic construct
  misc_feature 1..22: note = chemically synthesized
  source 1..22: mol_type = other DNA
ttgcttcttctcttgccatgtg

SEQ ID NO: 59338 - DNA, 22 bp, synthetic construct
  misc_feature 1..22: note = chemically synthesized
  source 1..22: mol_type = other DNA
gcttcttctcttgccatgtgat

SEQ ID NO: 59339 - DNA, 22 bp, synthetic construct
  misc_feature 1..22: note = chemically synthesized
  source 1..22: mol_type = other DNA
cttcttctcttgccatgtgatt

SEQ ID NO: 59340 - DNA, 22 bp, synthetic construct
  misc_feature 1..22: note = chemically synthesized
  source 1..22: mol_type = other DNA
cttctcttgccatgtgattgat

SEQ ID NO: 59341 - DNA, 22 bp, synthetic construct
  misc_feature 1..22: note = chemically synthesized
  source 1..22: mol_type = other DNA
ttctcttgccatgtgattgatc

SEQ ID NO: 59342 - DNA, 22 bp, synthetic construct
  misc_feature 1..22: note = chemically synthesized
  source 1..22: mol_type = other DNA
ctcttgccatgtgattgatctc

SEQ ID NO: 59343 - DNA, 22 bp, synthetic construct
  misc_feature 1..22: note = chemically synthesized
  source 1..22: mol_type = other DNA
tcttgccatgtgattgatctct

SEQ ID NO: 59344 - DNA, 22 bp, synthetic construct
  misc_feature 1..22: note = chemically synthesized
  source 1..22: mol_type = other DNA
ttgccatgtgattgatctctgc

SEQ ID NO: 59345 - DNA, 22 bp, synthetic construct
  misc_feature 1..22: note = chemically synthesized
  source 1..22: mol_type = other DNA
gccatgtgattgatctctgcac

SEQ ID NO: 59346 - DNA, 22 bp, synthetic construct
  misc_feature 1..22: note = chemically synthesized
  source 1..22: mol_type = other DNA
ccatgtgattgatctctgcaca

SEQ ID NO: 59347 - DNA, 22 bp, synthetic construct
  misc_feature 1..22: note = chemically synthesized
  source 1..22: mol_type = other DNA
atctctgcacatgtaggctccc

SEQ ID NO: 59348 - DNA, 22 bp, synthetic construct
  misc_feature 1..22: note = chemically synthesized
  source 1..22: mol_type = other DNA
tgcacatgtaggctccccttca

SEQ ID NO: 59349 - DNA, 22 bp, synthetic construct
  misc_feature 1..22: note = chemically synthesized
  source 1..22: mol_type = other DNA
cacatgtaggctccccttcacc

SEQ ID NO: 59350 - DNA, 22 bp, synthetic construct
  misc_feature 1..22: note = chemically synthesized
  source 1..22: mol_type = other DNA
cccttcaccttctgccatcagt

SEQ ID NO: 59351 - DNA, 22 bp, synthetic construct
  misc_feature 1..22: note = chemically synthesized
  source 1..22: mol_type = other DNA
caccttctgccatcagtgaaag

SEQ ID NO: 59352 - DNA, 22 bp, synthetic construct
  misc_feature 1..22: note = chemically synthesized
  source 1..22: mol_type = other DNA
accttctgccatcagtgaaagc

SEQ ID NO: 59353 - DNA, 22 bp, synthetic construct
  misc_feature 1..22: note = chemically synthesized
  source 1..22: mol_type = other DNA
ctgccatcagtgaaagcagctt

SEQ ID NO: 59354 - DNA, 22 bp, synthetic construct
  misc_feature 1..22: note = chemically synthesized
  source 1..22: mol_type = other DNA
tgccatcagtgaaagcagctta

SEQ ID NO: 59355 - DNA, 22 bp, synthetic construct
  misc_feature 1..22: note = chemically synthesized
  source 1..22: mol_type = other DNA
ccatcagtgaaagcagcttaag

SEQ ID NO: 59356 - DNA, 22 bp, synthetic construct
  misc_feature 1..22: note = chemically synthesized
  source 1..22: mol_type = other DNA
aaggccctcaccagaagcagat

SEQ ID NO: 59357 - DNA, 22 bp, synthetic construct
  misc_feature 1..22: note = chemically synthesized
  source 1..22: mol_type = other DNA
aggccctcaccagaagcagatg

SEQ ID NO: 59358 - DNA, 22 bp, synthetic construct
  misc_feature 1..22: note = chemically synthesized
  source 1..22: mol_type = other DNA
accagaagcagatgctggtgcc

SEQ ID NO: 59359 - DNA, 22 bp, synthetic construct
  misc_feature 1..22: note = chemically synthesized
  source 1..22: mol_type = other DNA
gtgccatgcttcctggagagct

SEQ ID NO: 59360 - DNA, 22 bp, synthetic construct
  misc_feature 1..22: note = chemically synthesized
  source 1..22: mol_type = other DNA
cctggagagcttgcagaatcat

SEQ ID NO: 59361 - DNA, 22 bp, synthetic construct
  misc_feature 1..22: note = chemically synthesized
  source 1..22: mol_type = other DNA
ctggagagcttgcagaatcatg

SEQ ID NO: 59362 - DNA, 22 bp, synthetic construct
  misc_feature 1..22: note = chemically synthesized
  source 1..22: mol_type = other DNA
gagagcttgcagaatcatgagc

SEQ ID NO: 59363 - DNA, 22 bp, synthetic construct
  misc_feature 1..22: note = chemically synthesized
  source 1..22: mol_type = other DNA
gcagaatcatgagctgaataaa

SEQ ID NO: 59364 - DNA, 22 bp, synthetic construct
  misc_feature 1..22: note = chemically synthesized
  source 1..22: mol_type = other DNA
cagaatcatgagctgaataaat

SEQ ID NO: 59365 - DNA, 22 bp, synthetic construct
  misc_feature 1..22: note = chemically synthesized
  source 1..22: mol_type = other DNA
aataaatcccttttccttgtaa

SEQ ID NO: 59366 - DNA, 22 bp, synthetic construct
  misc_feature 1..22: note = chemically synthesized
  source 1..22: mol_type = other DNA
ttccttgtaaattactcacctt

SEQ ID NO: 59367 - DNA, 22 bp, synthetic construct
  misc_feature 1..22: note = chemically synthesized
  source 1..22: mol_type = other DNA
tccttgtaaattactcaccttc

SEQ ID NO: 59368 - DNA, 22 bp, synthetic construct
  misc_feature 1..22: note = chemically synthesized
  source 1..22: mol_type = other DNA
ccttgtaaattactcaccttca

SEQ ID NO: 59369 - DNA, 22 bp, synthetic construct
  misc_feature 1..22: note = chemically synthesized
  source 1..22: mol_type = other DNA
cttgtaaattactcaccttcag

SEQ ID NO: 59370 - DNA, 22 bp, synthetic construct
  misc_feature 1..22: note = chemically synthesized
  source 1..22: mol_type = other DNA
gtaaattactcaccttcaggta

SEQ ID NO: 59371 - DNA, 22 bp, synthetic construct
  misc_feature 1..22: note = chemically synthesized
  source 1..22: mol_type = other DNA
taaattactcaccttcaggtat

SEQ ID NO: 59372 - DNA, 22 bp, synthetic construct
  misc_feature 1..22: note = chemically synthesized
  source 1..22: mol_type = other DNA
ctcaccttcaggtattccttta

SEQ ID NO: 59373 - DNA, 22 bp, synthetic construct
  misc_feature 1..22: note = chemically synthesized
  source 1..22: mol_type = other DNA
accttcaggtattcctttatat

SEQ ID NO: 59374 - DNA, 22 bp, synthetic construct
  misc_feature 1..22: note = chemically synthesized
  source 1..22: mol_type = other DNA
caggtattcctttatatagcaa

SEQ ID NO: 59375 - DNA, 22 bp, synthetic construct
  misc_feature 1..22: note = chemically synthesized
  source 1..22: mol_type = other DNA
aggtattcctttatatagcaac

SEQ ID NO: 59376 - DNA, 22 bp, synthetic construct
  misc_feature 1..22: note = chemically synthesized
  source 1..22: mol_type = other DNA
ctttatatagcaacacaaaagg

SEQ ID NO: 59377 - DNA, 22 bp, synthetic construct
  misc_feature 1..22: note = chemically synthesized
  source 1..22: mol_type = other DNA
tatatagcaacacaaaaggact

SEQ ID NO: 59378 - DNA, 22 bp, synthetic construct
  misc_feature 1..22: note = chemically synthesized
  source 1..22: mol_type = other DNA
atatagcaacacaaaaggacta

SEQ ID NO: 59379 - DNA, 22 bp, synthetic construct
  misc_feature 1..22: note = chemically synthesized
  source 1..22: mol_type = other DNA
tatagcaacacaaaaggactaa

SEQ ID NO: 59380 - DNA, 22 bp, synthetic construct
  misc_feature 1..22: note = chemically synthesized
  source 1..22: mol_type = other DNA
agacagtggccttgacttttct

SEQ ID NO: 59381 - DNA, 22 bp, synthetic construct
  misc_feature 1..22: note = chemically synthesized
  source 1..22: mol_type = other DNA
gacttttctctctctttaagaa

SEQ ID NO: 59382 - DNA, 22 bp, synthetic construct
  misc_feature 1..22: note = chemically synthesized
  source 1..22: mol_type = other DNA
acttttctctctctttaagaag

SEQ ID NO: 59383 - DNA, 22 bp, synthetic construct
  misc_feature 1..22: note = chemically synthesized
  source 1..22: mol_type = other DNA
ttctctctctttaagaagtgtt

SEQ ID NO: 59384 - DNA, 22 bp, synthetic construct
  misc_feature 1..22: note = chemically synthesized
  source 1..22: mol_type = other DNA
tctctctctttaagaagtgttg

SEQ ID NO: 59385 - DNA, 22 bp, synthetic construct
  misc_feature 1..22: note = chemically synthesized
  source 1..22: mol_type = other DNA
ctctctctttaagaagtgttgc

SEQ ID NO: 59386 - DNA, 22 bp, synthetic construct
  misc_feature 1..22: note = chemically synthesized
  source 1..22: mol_type = other DNA
tctctctttaagaagtgttgcc

SEQ ID NO: 59387 - DNA, 22 bp, synthetic construct
  misc_feature 1..22: note = chemically synthesized
  source 1..22: mol_type = other DNA
tctctttaagaagtgttgcctt

SEQ ID NO: 59388 - DNA, 22 bp, synthetic construct
  misc_feature 1..22: note = chemically synthesized
  source 1..22: mol_type = other DNA
tctttaagaagtgttgcctttg

SEQ ID NO: 59389 - DNA, 22 bp, synthetic construct
  misc_feature 1..22: note = chemically synthesized
  source 1..22: mol_type = other DNA
tttaagaagtgttgcctttgct

SEQ ID NO: 59390 - DNA, 22 bp, synthetic construct
  misc_feature 1..22: note = chemically synthesized
  source 1..22: mol_type = other DNA
taagaagtgttgcctttgctca

SEQ ID NO: 59391 - DNA, 22 bp, synthetic construct
  misc_feature 1..22: note = chemically synthesized
  source 1..22: mol_type = other DNA
aagaagtgttgcctttgctcac

SEQ ID NO: 59392 - DNA, 22 bp, synthetic construct
  misc_feature 1..22: note = chemically synthesized
  source 1..22: mol_type = other DNA
agaagtgttgcctttgctcact

SEQ ID NO: 59393 - DNA, 22 bp, synthetic construct
  misc_feature 1..22: note = chemically synthesized
  source 1..22: mol_type = other DNA
cctttgctcacttagtcatccc

SEQ ID NO: 59394 - DNA, 22 bp, synthetic construct
  misc_feature 1..22: note = chemically synthesized
  source 1..22: mol_type = other DNA
tgctcacttagtcatcccttct

SEQ ID NO: 59395 - DNA, 22 bp, synthetic construct
  misc_feature 1..22: note = chemically synthesized
  source 1..22: mol_type = other DNA
gctcacttagtcatcccttctg

SEQ ID NO: 59396 - DNA, 22 bp, synthetic construct
  misc_feature 1..22: note = chemically synthesized
  source 1..22: mol_type = other DNA
ctcacttagtcatcccttctgc

SEQ ID NO: 59397 - DNA, 22 bp, synthetic construct
  misc_feature 1..22: note = chemically synthesized
  source 1..22: mol_type = other DNA
acttagtcatcccttctgcctg

SEQ ID NO: 59398 - DNA, 22 bp, synthetic construct
  misc_feature 1..22: note = chemically synthesized
  source 1..22: mol_type = other DNA
agtcatcccttctgcctgcatt

SEQ ID NO: 59399 - DNA, 22 bp, synthetic construct
  misc_feature 1..22: note = chemically synthesized
  source 1..22: mol_type = other DNA
gtcatcccttctgcctgcattt

SEQ ID NO: 59400 - DNA, 22 bp, synthetic construct
  misc_feature 1..22: note = chemically synthesized
  source 1..22: mol_type = other DNA
ctgcctgcatttgtagagcatc

SEQ ID NO: 59401 - DNA, 22 bp, synthetic construct
  misc_feature 1..22: note = chemically synthesized
  source 1..22: mol_type = other DNA
tgcctgcatttgtagagcatct

SEQ ID NO: 59402 - DNA, 22 bp, synthetic construct
  misc_feature 1..22: note = chemically synthesized
  source 1..22: mol_type = other DNA
cctgcatttgtagagcatctgg

SEQ ID NO: 59403 - DNA, 22 bp, synthetic construct
  misc_feature 1..22: note = chemically synthesized
  source 1..22: mol_type = other DNA
catttgtagagcatctggatgg

SEQ ID NO: 59404 - DNA, 22 bp, synthetic construct
  misc_feature 1..22: note = chemically synthesized
  source 1..22: mol_type = other DNA
gtagagcatctggatgggagat

SEQ ID NO: 59405 - DNA, 22 bp, synthetic construct
  misc_feature 1..22: note = chemically synthesized
  source 1..22: mol_type = other DNA
tagagcatctggatgggagatt

SEQ ID NO: 59406 - DNA, 22 bp, synthetic construct
  misc_feature 1..22: note = chemically synthesized
  source 1..22: mol_type = other DNA
gatgggagatttatataaccgt

SEQ ID NO: 59407 - DNA, 22 bp, synthetic construct
  misc_feature 1..22: note = chemically synthesized
  source 1..22: mol_type = other DNA
atataaccgtcactcttgactt

SEQ ID NO: 59408 - DNA, 22 bp, synthetic construct
  misc_feature 1..22: note = chemically synthesized
  source 1..22: mol_type = other DNA
tataaccgtcactcttgacttt

SEQ ID NO: 59409 - DNA, 22 bp, synthetic construct
  misc_feature 1..22: note = chemically synthesized
  source 1..22: mol_type = other DNA
ttgactttcccagcaggcctat

SEQ ID NO: 59410 - DNA, 22 bp, synthetic construct
  misc_feature 1..22: note = chemically synthesized
  source 1..22: mol_type = other DNA
gactttcccagcaggcctatgt

SEQ ID NO: 59411 - DNA, 22 bp, synthetic construct
  misc_feature 1..22: note = chemically synthesized
  source 1..22: mol_type = other DNA
actttcccagcaggcctatgtc

SEQ ID NO: 59412 - DNA, 22 bp, synthetic construct
  misc_feature 1..22: note = chemically synthesized
  source 1..22: mol_type = other DNA
tcccagcaggcctatgtcatag

SEQ ID NO: 59413 - DNA, 22 bp, synthetic construct
  misc_feature 1..22: note = chemically synthesized
  source 1..22: mol_type = other DNA
cccagcaggcctatgtcatagg

SEQ ID NO: 59414 - DNA, 22 bp, synthetic construct
  misc_feature 1..22: note = chemically synthesized
  source 1..22: mol_type = other DNA
ccagcaggcctatgtcataggt

SEQ ID NO: 59415 - DNA, 22 bp, synthetic construct
  misc_feature 1..22: note = chemically synthesized
  source 1..22: mol_type = other DNA
tgtcataggtactgtggtctct

SEQ ID NO: 59416 - DNA, 22 bp, synthetic construct
  misc_feature 1..22: note = chemically synthesized
  source 1..22: mol_type = other DNA
tggtctctacaatacagcagag

SEQ ID NO: 59417 - DNA, 22 bp, synthetic construct
  misc_feature 1..22: note = chemically synthesized
  source 1..22: mol_type = other DNA
tacaatacagcagaggtatctg

SEQ ID NO: 59418 - DNA, 22 bp, synthetic construct
  misc_feature 1..22: note = chemically synthesized
  source 1..22: mol_type = other DNA
caatacagcagaggtatctgag

SEQ ID NO: 59419 - DNA, 22 bp, synthetic construct
  misc_feature 1..22: note = chemically synthesized
  source 1..22: mol_type = other DNA
aggctccgagaggttgagtgac

SEQ ID NO: 59420 - DNA, 22 bp, synthetic construct
  misc_feature 1..22: note = chemically synthesized
  source 1..22: mol_type = other DNA
cgagaggttgagtgacttgctc

SEQ ID NO: 59421 - DNA, 22 bp, synthetic construct
  misc_feature 1..22: note = chemically synthesized
  source 1..22: mol_type = other DNA
agtgacttgctcatggctgcac

SEQ ID NO: 59422 - DNA, 22 bp, synthetic construct
  misc_feature 1..22: note = chemically synthesized
  source 1..22: mol_type = other DNA
gctcatggctgcacaaccagta

SEQ ID NO: 59423 - DNA, 22 bp, synthetic construct
  misc_feature 1..22: note = chemically synthesized
  source 1..22: mol_type = other DNA
ctcatggctgcacaaccagtaa

SEQ ID NO: 59424 - DNA, 22 bp, synthetic construct
  misc_feature 1..22: note = chemically synthesized
  source 1..22: mol_type = other DNA
atggctgcacaaccagtaaata

SEQ ID NO: 59425 - DNA, 22 bp, synthetic construct
  misc_feature 1..22: note = chemically synthesized
  source 1..22: mol_type = other DNA
cacaaccagtaaatattggagc

SEQ ID NO: 59426 - DNA, 22 bp, synthetic construct
  misc_feature 1..22: note = chemically synthesized
  source 1..22: mol_type = other DNA
gagctggaattcaggtccacgg

SEQ ID NO: 59427 - DNA, 22 bp, synthetic construct
  misc_feature 1..22: note = chemically synthesized
  source 1..22: mol_type = other DNA
gaattcaggtccacggtttcct

SEQ ID NO: 59428 - DNA, 22 bp, synthetic construct
  misc_feature 1..22: note = chemically synthesized
  source 1..22: mol_type = other DNA
aggtccacggtttcctggctcc

SEQ ID NO: 59429 - DNA, 22 bp, synthetic construct
  misc_feature 1..22: note = chemically synthesized
  source 1..22: mol_type = other DNA
cctggctccaaagcccatgatt

SEQ ID NO: 59430 - DNA, 22 bp, synthetic construct
  misc_feature 1..22: note = chemically synthesized
  source 1..22: mol_type = other DNA
ctggctccaaagcccatgattt

SEQ ID NO: 59431 - DNA, 22 bp, synthetic construct
  misc_feature 1..22: note = chemically synthesized
  source 1..22: mol_type = other DNA
gctccaaagcccatgatttttt

SEQ ID NO: 59432 - DNA, 22 bp, synthetic construct
  misc_feature 1..22: note = chemically synthesized
  source 1..22: mol_type = other DNA
caaagcccatgattttttccct

SEQ ID NO: 59433 - DNA, 22 bp, synthetic construct
  misc_feature 1..22: note = chemically synthesized
  source 1..22: mol_type = other DNA
tttccctcaatttattctgact

SEQ ID NO: 59434 - DNA, 22 bp, synthetic construct
  misc_feature 1..22: note = chemically synthesized
  source 1..22: mol_type = other DNA
ttccctcaatttattctgactg

SEQ ID NO: 59435 - DNA, 22 bp, synthetic construct
  misc_feature 1..22: note = chemically synthesized
  source 1..22: mol_type = other DNA
tccctcaatttattctgactgg

SEQ ID NO: 59436 - DNA, 22 bp, synthetic construct
  misc_feature 1..22: note = chemically synthesized
  source 1..22: mol_type = other DNA
ccctcaatttattctgactggg

SEQ ID NO: 59437 - DNA, 22 bp, synthetic construct
  misc_feature 1..22: note = chemically synthesized
  source 1..22: mol_type = other DNA
cctcaatttattctgactgggg

SEQ ID NO: 59438 - DNA, 22 bp, synthetic construct
  misc_feature 1..22: note = chemically synthesized
  source 1..22: mol_type = other DNA
aatttattctgactggggcatg

SEQ ID NO: 59439 - DNA, 22 bp, synthetic construct
  misc_feature 1..22: note = chemically synthesized
  source 1..22: mol_type = other DNA
attctgactggggcatggggga

SEQ ID NO: 59440 - DNA, 22 bp, synthetic construct
  misc_feature 1..22: note = chemically synthesized
  source 1..22: mol_type = other DNA
ttctgactggggcatgggggag

SEQ ID NO: 59441 - DNA, 22 bp, synthetic construct
  misc_feature 1..22: note = chemically synthesized
  source 1..22: mol_type = other DNA
tgactggggcatgggggagggg

SEQ ID NO: 59442 - DNA, 22 bp, synthetic construct
  misc_feature 1..22: note = chemically synthesized
  source 1..22: mol_type = other DNA
actggggcatgggggagggggt

SEQ ID NO: 59443 - DNA, 22 bp, synthetic construct
  misc_feature 1..22: note = chemically synthesized
  source 1..22: mol_type = other DNA
gggcatgggggagggggtggcc

SEQ ID NO: 59444 - DNA, 22 bp, synthetic construct
  misc_feature 1..22: note = chemically synthesized
  source 1..22: mol_type = other DNA
tgggcagggccaccaggagcga

SEQ ID NO: 59445 - DNA, 22 bp, synthetic construct
  misc_feature 1..22: note = chemically synthesized
  source 1..22: mol_type = other DNA
gggcagggccaccaggagcgac

SEQ ID NO: 59446 - DNA, 22 bp, synthetic construct
  misc_feature 1..22: note = chemically synthesized
  source 1..22: mol_type = other DNA
ggcagggccaccaggagcgacc

SEQ ID NO: 59447 - DNA, 22 bp, synthetic construct
  misc_feature 1..22: note = chemically synthesized
  source 1..22: mol_type = other DNA
ggtgcaggtacagaggaaaacc

SEQ ID NO: 59448 - DNA, 22 bp, synthetic construct
  misc_feature 1..22: note = chemically synthesized
  source 1..22: mol_type = other DNA
ttgtcgagtgtggcccgtagtt

SEQ ID NO: 59449 - DNA, 22 bp, synthetic construct
  misc_feature 1..22: note = chemically synthesized
  source 1..22: mol_type = other DNA
tcgagtgtggcccgtagttccc

SEQ ID NO: 59450 - DNA, 22 bp, synthetic construct
  misc_feature 1..22: note = chemically synthesized
  source 1..22: mol_type = other DNA
ccatttttgcctgaatggcaca

SEQ ID NO: 59451 - DNA, 22 bp, synthetic construct
  misc_feature 1..22: note = chemically synthesized
  source 1..22: mol_type = other DNA
ttgcctgaatggcacatttgaa

SEQ ID NO: 59452 - DNA, 22 bp, synthetic construct
  misc_feature 1..22: note = chemically synthesized
  source 1..22: mol_type = other DNA
tgcctgaatggcacatttgaaa

SEQ ID NO: 59453 - DNA, 22 bp, synthetic construct
  misc_feature 1..22: note = chemically synthesized
  source 1..22: mol_type = other DNA
gcctgaatggcacatttgaaag

SEQ ID NO: 59454 - DNA, 22 bp, synthetic construct
  misc_feature 1..22: note = chemically synthesized
  source 1..22: mol_type = other DNA
cctgaatggcacatttgaaagt

SEQ ID NO: 59455 - DNA, 22 bp, synthetic construct
  misc_feature 1..22: note = chemically synthesized
  source 1..22: mol_type = other DNA
aatggcacatttgaaagtgtta

SEQ ID NO: 59456 - DNA, 22 bp, synthetic construct
  misc_feature 1..22: note = chemically synthesized
  source 1..22: mol_type = other DNA
gaaagtgttatataaccatgtg

SEQ ID NO: 59457 - DNA, 22 bp, synthetic construct
  misc_feature 1..22: note = chemically synthesized
  source 1..22: mol_type = other DNA
aaagtgttatataaccatgtga

SEQ ID NO: 59458 - DNA, 22 bp, synthetic construct
  misc_feature 1..22: note = chemically synthesized
  source 1..22: mol_type = other DNA
tataaccatgtgaataataata

SEQ ID NO: 59459 - DNA, 22 bp, synthetic construct
  misc_feature 1..22: note = chemically synthesized
  source 1..22: mol_type = other DNA
gcctatatgagttctttaattt

SEQ ID NO: 59460 - DNA, 22 bp, synthetic construct
  misc_feature 1..22: note = chemically synthesized
  source 1..22: mol_type = other DNA
tatgagttctttaatttgcttt

SEQ ID NO: 59461 - DNA, 22 bp, synthetic construct
  misc_feature 1..22: note = chemically synthesized
  source 1..22: mol_type = other DNA
tttaatttgctttttggtccgc

SEQ ID NO: 59462 - DNA, 22 bp, synthetic construct
  misc_feature 1..22: note = chemically synthesized
  source 1..22: mol_type = other DNA
taatttgctttttggtccgcat

SEQ ID NO: 59463 - DNA, 22 bp, synthetic construct
  misc_feature 1..22: note = chemically synthesized
  source 1..22: mol_type = other DNA
aatttgctttttggtccgcatt

SEQ ID NO: 59464 - DNA, 22 bp, synthetic construct
  misc_feature 1..22: note = chemically synthesized
  source 1..22: mol_type = other DNA
atttgctttttggtccgcattt

SEQ ID NO: 59465 - DNA, 22 bp, synthetic construct
  misc_feature 1..22: note = chemically synthesized
  source 1..22: mol_type = other DNA
gctttttggtccgcatttggta

SEQ ID NO: 59466 - DNA, 22 bp, synthetic construct
  misc_feature 1..22: note = chemically synthesized
  source 1..22: mol_type = other DNA
ctttttggtccgcatttggtaa

SEQ ID NO: 59467 - DNA, 22 bp, synthetic construct
  misc_feature 1..22: note = chemically synthesized
  source 1..22: mol_type = other DNA
tttggtccgcatttggtaactt

SEQ ID NO: 59468 - DNA, 22 bp, synthetic construct
  misc_feature 1..22: note = chemically synthesized
  source 1..22: mol_type = other DNA
ttggtccgcatttggtaacttc

SEQ ID NO: 59469 - DNA, 22 bp, synthetic construct
  misc_feature 1..22: note = chemically synthesized
  source 1..22: mol_type = other DNA
tggtccgcatttggtaacttct

SEQ ID NO: 59470 - DNA, 22 bp, synthetic construct
  misc_feature 1..22: note = chemically synthesized
  source 1..22: mol_type = other DNA
ggtccgcatttggtaacttctt

SEQ ID NO: 59471 - DNA, 22 bp, synthetic construct
  misc_feature 1..22: note = chemically synthesized
  source 1..22: mol_type = other DNA
gtccgcatttggtaacttcttt

SEQ ID NO: 59472 - DNA, 22 bp, synthetic construct
  misc_feature 1..22: note = chemically synthesized
  source 1..22: mol_type = other DNA
ggtaacttctttatcatctact

SEQ ID NO: 59473 - DNA, 22 bp, synthetic construct
  misc_feature 1..22: note = chemically synthesized
  source 1..22: mol_type = other DNA
gtaacttctttatcatctacta

SEQ ID NO: 59474 - DNA, 22 bp, synthetic construct
  misc_feature 1..22: note = chemically synthesized
  source 1..22: mol_type = other DNA
ctttatcatctactatactctg

SEQ ID NO: 59475 - DNA, 22 bp, synthetic construct
  misc_feature 1..22: note = chemically synthesized
  source 1..22: mol_type = other DNA
tttatcatctactatactctgt

SEQ ID NO: 59476 - DNA, 22 bp, synthetic construct
  misc_feature 1..22: note = chemically synthesized
  source 1..22: mol_type = other DNA
tatcatctactatactctgttg

SEQ ID NO: 59477 - DNA, 22 bp, synthetic construct
  misc_feature 1..22: note = chemically synthesized
  source 1..22: mol_type = other DNA
atcatctactatactctgttgt

SEQ ID NO: 59478 - DNA, 22 bp, synthetic construct
  misc_feature 1..22: note = chemically synthesized
  source 1..22: mol_type = other DNA
tcatctactatactctgttgtg

SEQ ID NO: 59479 - DNA, 22 bp, synthetic construct
  misc_feature 1..22: note = chemically synthesized
  source 1..22: mol_type = other DNA
ctatactctgttgtgtctcttt

SEQ ID NO: 59480 - DNA, 22 bp, synthetic construct
  misc_feature 1..22: note = chemically synthesized
  source 1..22: mol_type = other DNA
tactctgttgtgtctcttttgt

SEQ ID NO: 59481 - DNA, 22 bp, synthetic construct
  misc_feature 1..22: note = chemically synthesized
  source 1..22: mol_type = other DNA
tgttgtgtctcttttgttgtaa

SEQ ID NO: 59482 - DNA, 22 bp, synthetic construct
  misc_feature 1..22: note = chemically synthesized
  source 1..22: mol_type = other DNA
ttgtgtctcttttgttgtaatt

SEQ ID NO: 59483 - DNA, 22 bp, synthetic construct
  misc_feature 1..22: note = chemically synthesized
  source 1..22: mol_type = other DNA
tgtctcttttgttgtaatttgt

SEQ ID NO: 59484 - DNA, 22 bp, synthetic construct
  misc_feature 1..22: note = chemically synthesized
  source 1..22: mol_type = other DNA
ttttgttgtaatttgtaagtag

SEQ ID NO: 59485 - DNA, 22 bp, synthetic construct
  misc_feature 1..22: note = chemically synthesized
  source 1..22: mol_type = other DNA
ttgttgtaatttgtaagtaggg

SEQ ID NO: 59486 - DNA, 22 bp, synthetic construct
  misc_feature 1..22: note = chemically synthesized
  source 1..22: mol_type = other DNA
tgttgtaatttgtaagtagggg

SEQ ID NO: 59487 - DNA, 22 bp, synthetic construct
  misc_feature 1..22: note = chemically synthesized
  source 1..22: mol_type = other DNA
gttgtaatttgtaagtaggggt

SEQ ID NO: 59488 - DNA, 22 bp, synthetic construct
  misc_feature 1..22: note = chemically synthesized
  source 1..22: mol_type = other DNA
ttgtaatttgtaagtaggggtg

SEQ ID NO: 59489 - DNA, 22 bp, synthetic construct
  misc_feature 1..22: note = chemically synthesized
  source 1..22: mol_type = other DNA
taatttgtaagtaggggtgaga

SEQ ID NO: 59490 - DNA, 22 bp, synthetic construct
  misc_feature 1..22: note = chemically synthesized
  source 1..22: mol_type = other DNA
gtaagtaggggtgagataaagt

SEQ ID NO: 59491 - DNA, 22 bp, synthetic construct
  misc_feature 1..22: note = chemically synthesized
  source 1..22: mol_type = other DNA
taagtaggggtgagataaagta

SEQ ID NO: 59492 - DNA, 22 bp, synthetic construct
  misc_feature 1..22: note = chemically synthesized
  source 1..22: mol_type = other DNA
gggtttgctgggtttcttccat

SEQ ID NO: 59493 - DNA, 22 bp, synthetic construct
  misc_feature 1..22: note = chemically synthesized
  source 1..22: mol_type = other DNA
gctgggtttcttccatgtcatc

SEQ ID NO: 59494 - DNA, 22 bp, synthetic construct
  misc_feature 1..22: note = chemically synthesized
  source 1..22: mol_type = other DNA
ctgggtttcttccatgtcatca

SEQ ID NO: 59495 - DNA, 22 bp, synthetic construct
  misc_feature 1..22: note = chemically synthesized
  source 1..22: mol_type = other DNA
ggtttcttccatgtcatcatgt

SEQ ID NO: 59496 - DNA, 22 bp, synthetic construct
  misc_feature 1..22: note = chemically synthesized
  source 1..22: mol_type = other DNA
cttccatgtcatcatgttcctc

SEQ ID NO: 59497 - DNA, 22 bp, synthetic construct
  misc_feature 1..22: note = chemically synthesized
  source 1..22: mol_type = other DNA
ttccatgtcatcatgttcctcc

SEQ ID NO: 59498 - DNA, 22 bp, synthetic construct
  misc_feature 1..22: note = chemically synthesized
  source 1..22: mol_type = other DNA
ccatgtcatcatgttcctcctt

SEQ ID NO: 59499 - DNA, 22 bp, synthetic construct
  misc_feature 1..22: note = chemically synthesized
  source 1..22: mol_type = other DNA
catgtcatcatgttcctccttg

SEQ ID NO: 59500 - DNA, 22 bp, synthetic construct
  misc_feature 1..22: note = chemically synthesized
  source 1..22: mol_type = other DNA
ctccttgcatggggccaggatc

SEQ ID NO: 59501 - DNA, 22 bp, synthetic construct
  misc_feature 1..22: note = chemically synthesized
  source 1..22: mol_type = other DNA
cttgcatggggccaggatccgt

SEQ ID NO: 59502 - DNA, 22 bp, synthetic construct
  misc_feature 1..22: note = chemically synthesized
  source 1..22: mol_type = other DNA
gcatggggccaggatccgtgga

SEQ ID NO: 59503 - DNA, 22 bp, synthetic construct
  misc_feature 1..22: note = chemically synthesized
  source 1..22: mol_type = other DNA
catggggccaggatccgtggag

SEQ ID NO: 59504 - DNA, 22 bp, synthetic construct
  misc_feature 1..22: note = chemically synthesized
  source 1..22: mol_type = other DNA
cctggcacctacgtggtggtgc

SEQ ID NO: 59505 - DNA, 22 bp, synthetic construct
  misc_feature 1..22: note = chemically synthesized
  source 1..22: mol_type = other DNA
gcacctacgtggtggtgctgaa

SEQ ID NO: 59506 - DNA, 22 bp, synthetic construct
  misc_feature 1..22: note = chemically synthesized
  source 1..22: mol_type = other DNA
cgtggtggtgctgaaggaggag

SEQ ID NO: 59507 - DNA, 22 bp, synthetic construct
  misc_feature 1..22: note = chemically synthesized
  source 1..22: mol_type = other DNA
aaggaggagacccacctctcgc

SEQ ID NO: 59508 - DNA, 22 bp, synthetic construct
  misc_feature 1..22: note = chemically synthesized
  source 1..22: mol_type = other DNA
tcgcagtcagagcgcactgccc

SEQ ID NO: 59509 - DNA, 22 bp, synthetic construct
  misc_feature 1..22: note = chemically synthesized
  source 1..22: mol_type = other DNA
gcagtcagagcgcactgcccgc

SEQ ID NO: 59510 - DNA, 22 bp, synthetic construct
  misc_feature 1..22: note = chemically synthesized
  source 1..22: mol_type = other DNA
cccgccgcctgcaggcccaggc

SEQ ID NO: 59511 - DNA, 22 bp, synthetic construct
  misc_feature 1..22: note = chemically synthesized
  source 1..22: mol_type = other DNA
caggcccaggctgcccgccggg

SEQ ID NO: 59512 - DNA, 22 bp, synthetic construct
  misc_feature 1..22: note = chemically synthesized
  source 1..22: mol_type = other DNA
cccgccggggatacctcaccaa

SEQ ID NO: 59513 - DNA, 22 bp, synthetic construct
  misc_feature 1..22: note = chemically synthesized
  source 1..22: mol_type = other DNA
accaagatcctgcatgtcttcc

SEQ ID NO: 59514 - DNA, 22 bp, synthetic construct
  misc_feature 1..22: note = chemically synthesized
  source 1..22: mol_type = other DNA
catgtcttccatggccttcttc

SEQ ID NO: 59515 - DNA, 22 bp, synthetic construct
  misc_feature 1..22: note = chemically synthesized
  source 1..22: mol_type = other DNA
ccatggccttcttcctggcttc

SEQ ID NO: 59516 - DNA, 22 bp, synthetic construct
  misc_feature 1..22: note = chemically synthesized
  source 1..22: mol_type = other DNA
catggccttcttcctggcttcc

SEQ ID NO: 59517 - DNA, 22 bp, synthetic construct
  misc_feature 1..22: note = chemically synthesized
  source 1..22: mol_type = other DNA
cttcctggcttcctggtgaaga

SEQ ID NO: 59518 - DNA, 22 bp, synthetic construct
  misc_feature 1..22: note = chemically synthesized
  source 1..22: mol_type = other DNA
ttcctggcttcctggtgaagat

SEQ ID NO: 59519 - DNA, 22 bp, synthetic construct
  misc_feature 1..22: note = chemically synthesized
  source 1..22: mol_type = other DNA
cctggcttcctggtgaagatga

SEQ ID NO: 59520 - DNA, 22 bp, synthetic construct
  misc_feature 1..22: note = chemically synthesized
  source 1..22: mol_type = other DNA
ctggcttcctggtgaagatgag

SEQ ID NO: 59521 - DNA, 22 bp, synthetic construct
  misc_feature 1..22: note = chemically synthesized
  source 1..22: mol_type = other DNA
gcttcctggtgaagatgagtgg

SEQ ID NO: 59522 - DNA, 22 bp, synthetic construct
  misc_feature 1..22: note = chemically synthesized
  source 1..22: mol_type = other DNA
cctggtgaagatgagtggcgac

SEQ ID NO: 59523 - DNA, 22 bp, synthetic construct
  misc_feature 1..22: note = chemically synthesized
  source 1..22: mol_type = other DNA
ctggtgaagatgagtggcgacc

SEQ ID NO: 59524 - DNA, 22 bp, synthetic construct
  misc_feature 1..22: note = chemically synthesized
  source 1..22: mol_type = other DNA
gtgaagatgagtggcgacctgc

SEQ ID NO: 59525 - DNA, 22 bp, synthetic construct
  misc_feature 1..22: note = chemically synthesized
  source 1..22: mol_type = other DNA
ctggagctggtgagccaccctt

SEQ ID NO: 59526 - DNA, 22 bp, synthetic construct
  misc_feature 1..22: note = chemically synthesized
  source 1..22: mol_type = other DNA
gagctggtgagccacccttttt

SEQ ID NO: 59527 - DNA, 22 bp, synthetic construct
  misc_feature 1..22: note = chemically synthesized
  source 1..22: mol_type = other DNA
gtgagccaccctttttgggaat

SEQ ID NO: 59528 - DNA, 22 bp, synthetic construct
  misc_feature 1..22: note = chemically synthesized
  source 1..22: mol_type = other DNA
tttgggaatggcacttcctgat

SEQ ID NO: 59529 - DNA, 22 bp, synthetic construct
  misc_feature 1..22: note = chemically synthesized
  source 1..22: mol_type = other DNA
ttgggaatggcacttcctgata

SEQ ID NO: 59530 - DNA, 22 bp, synthetic construct
  misc_feature 1..22: note = chemically synthesized
  source 1..22: mol_type = other DNA
tgggaatggcacttcctgatag

SEQ ID NO: 59531 - DNA, 22 bp, synthetic construct
  misc_feature 1..22: note = chemically synthesized
  source 1..22: mol_type = other DNA
gggaatggcacttcctgatagg

SEQ ID NO: 59532 - DNA, 22 bp, synthetic construct
  misc_feature 1..22: note = chemically synthesized
  source 1..22: mol_type = other DNA
ggaatggcacttcctgataggg

SEQ ID NO: 59533 - DNA, 22 bp, synthetic construct
  misc_feature 1..22: note = chemically synthesized
  source 1..22: mol_type = other DNA
cctgatagggctgggccactgc

SEQ ID NO: 59534 - DNA, 22 bp, synthetic construct
  misc_feature 1..22: note = chemically synthesized
  source 1..22: mol_type = other DNA
ctgatagggctgggccactgca

SEQ ID NO: 59535 - DNA, 22 bp, synthetic construct
  misc_feature 1..22: note = chemically synthesized
  source 1..22: mol_type = other DNA
atagggctgggccactgcatat

SEQ ID NO: 59536 - DNA, 22 bp, synthetic construct
  misc_feature 1..22: note = chemically synthesized
  source 1..22: mol_type = other DNA
ggccactgcatatacactgggg

SEQ ID NO: 59537 - DNA, 22 bp, synthetic construct
  misc_feature 1..22: note = chemically synthesized
  source 1..22: mol_type = other DNA
catatacactggggactgtgct

SEQ ID NO: 59538 - DNA, 22 bp, synthetic construct
  misc_feature 1..22: note = chemically synthesized
  source 1..22: mol_type = other DNA
gggactgtgcttagtaggccca

SEQ ID NO: 59539 - DNA, 22 bp, synthetic construct
  misc_feature 1..22: note = chemically synthesized
  source 1..22: mol_type = other DNA
tgcttagtaggcccattgctga

SEQ ID NO: 59540 - DNA, 22 bp, synthetic construct
  misc_feature 1..22: note = chemically synthesized
  source 1..22: mol_type = other DNA
agtaggcccattgctgaaaatc

SEQ ID NO: 59541 - DNA, 22 bp, synthetic construct
  misc_feature 1..22: note = chemically synthesized
  source 1..22: mol_type = other DNA
gtaggcccattgctgaaaatca

SEQ ID NO: 59542 - DNA, 22 bp, synthetic construct
  misc_feature 1..22: note = chemically synthesized
  source 1..22: mol_type = other DNA
ctgaaaatcagaaggggacagc

SEQ ID NO: 59543 - DNA, 22 bp, synthetic construct
  misc_feature 1..22: note = chemically synthesized
  source 1..22: mol_type = other DNA
aaaatcagaaggggacagcaag

SEQ ID NO: 59544 - DNA, 22 bp, synthetic construct
  misc_feature 1..22: note = chemically synthesized
  source 1..22: mol_type = other DNA
agcacttatcgggtaccaagca

SEQ ID NO: 59545 - DNA, 22 bp, synthetic construct
  misc_feature 1..22: note = chemically synthesized
  source 1..22: mol_type = other DNA
atcgggtaccaagcacagtaac

SEQ ID NO: 59546 - DNA, 22 bp, synthetic construct
  misc_feature 1..22: note = chemically synthesized
  source 1..22: mol_type = other DNA
tcgggtaccaagcacagtaact

SEQ ID NO: 59547 - DNA, 22 bp, synthetic construct
  misc_feature 1..22: note = chemically synthesized
  source 1..22: mol_type = other DNA
ctggctttctgtatagaattcc

SEQ ID NO: 59548 - DNA, 22 bp, synthetic construct
  misc_feature 1..22: note = chemically synthesized
  source 1..22: mol_type = other DNA
gctttctgtatagaattccctt

SEQ ID NO: 59549 - DNA, 22 bp, synthetic construct
  misc_feature 1..22: note = chemically synthesized
  source 1..22: mol_type = other DNA
tctgtatagaattccctttaag

SEQ ID NO: 59550 - DNA, 22 bp, synthetic construct
  misc_feature 1..22: note = chemically synthesized
  source 1..22: mol_type = other DNA
ctgtatagaattccctttaagc

SEQ ID NO: 59551 - DNA, 22 bp, synthetic construct
  misc_feature 1..22: note = chemically synthesized
  source 1..22: mol_type = other DNA
tgtatagaattccctttaagcc

SEQ ID NO: 59552 - DNA, 22 bp, synthetic construct
  misc_feature 1..22: note = chemically synthesized
  source 1..22: mol_type = other DNA
tatagaattccctttaagcctg

SEQ ID NO: 59553 - DNA, 22 bp, synthetic construct
  misc_feature 1..22: note = chemically synthesized
  source 1..22: mol_type = other DNA
cctttaagcctggccatgcccc

SEQ ID NO: 59554 - DNA, 22 bp, synthetic construct
  misc_feature 1..22: note = chemically synthesized
  source 1..22: mol_type = other DNA
taagcctggccatgccccagtg

SEQ ID NO: 59555 - DNA, 22 bp, synthetic construct
  misc_feature 1..22: note = chemically synthesized
  source 1..22: mol_type = other DNA
aagcctggccatgccccagtgg

SEQ ID NO: 59556 - DNA, 22 bp, synthetic construct
  misc_feature 1..22: note = chemically synthesized
  source 1..22: mol_type = other DNA
agcctggccatgccccagtggt

SEQ ID NO: 59557 - DNA, 22 bp, synthetic construct
  misc_feature 1..22: note = chemically synthesized
  source 1..22: mol_type = other DNA
gccatgccccagtggtacgtct

SEQ ID NO: 59558 - DNA, 22 bp, synthetic construct
  misc_feature 1..22: note = chemically synthesized
  source 1..22: mol_type = other DNA
tcttcatttgaaagacgaggag

SEQ ID NO: 59559 - DNA, 22 bp, synthetic construct
  misc_feature 1..22: note = chemically synthesized
  source 1..22: mol_type = other DNA
catttgaaagacgaggagactg

SEQ ID NO: 59560 - DNA, 22 bp, synthetic construct
  misc_feature 1..22: note = chemically synthesized
  source 1..22: mol_type = other DNA
atttgaaagacgaggagactga

SEQ ID NO: 59561 - DNA, 22 bp, synthetic construct
  misc_feature 1..22: note = chemically synthesized
  source 1..22: mol_type = other DNA
gaaagacgaggagactgaagtt

SEQ ID NO: 59562 - DNA, 22 bp, synthetic construct
  misc_feature 1..22: note = chemically synthesized
  source 1..22: mol_type = other DNA
aaagacgaggagactgaagttc

SEQ ID NO: 59563 - DNA, 22 bp, synthetic construct
  misc_feature 1..22: note = chemically synthesized
  source 1..22: mol_type = other DNA
aagttcagaggggaccacacag

SEQ ID NO: 59564 - DNA, 22 bp, synthetic construct
  misc_feature 1..22: note = chemically synthesized
  source 1..22: mol_type = other DNA
agaggggaccacacagacagct

SEQ ID NO: 59565 - DNA, 22 bp, synthetic construct
  misc_feature 1..22: note = chemically synthesized
  source 1..22: mol_type = other DNA
ggggtagagcctggatcaaacc

SEQ ID NO: 59566 - DNA, 22 bp, synthetic construct
  misc_feature 1..22: note = chemically synthesized
  source 1..22: mol_type = other DNA
gatcaaacccattggtctgcct

SEQ ID NO: 59567 - DNA, 22 bp, synthetic construct
  misc_feature 1..22: note = chemically synthesized
  source 1..22: mol_type = other DNA
gtctgcctgccagccattcttg

SEQ ID NO: 59568 - DNA, 22 bp, synthetic construct
  misc_feature 1..22: note = chemically synthesized
  source 1..22: mol_type = other DNA
cctgccagccattcttgtgcca

SEQ ID NO: 59569 - DNA, 22 bp, synthetic construct
  misc_feature 1..22: note = chemically synthesized
  source 1..22: mol_type = other DNA
ccagccattcttgtgccaatgc

SEQ ID NO: 59570 - DNA, 22 bp, synthetic construct
  misc_feature 1..22: note = chemically synthesized
  source 1..22: mol_type = other DNA
ttgtgccaatgcatctgctgcc

SEQ ID NO: 59571 - DNA, 22 bp, synthetic construct
  misc_feature 1..22: note = chemically synthesized
  source 1..22: mol_type = other DNA
gtgccaatgcatctgctgccta

SEQ ID NO: 59572 - DNA, 22 bp, synthetic construct
  misc_feature 1..22: note = chemically synthesized
  source 1..22: mol_type = other DNA
tgccaatgcatctgctgcctac

SEQ ID NO: 59573 - DNA, 22 bp, synthetic construct
  misc_feature 1..22: note = chemically synthesized
  source 1..22: mol_type = other DNA
ctgcctacggaaacctgtaggg

SEQ ID NO: 59574 - DNA, 22 bp, synthetic construct
  misc_feature 1..22: note = chemically synthesized
  source 1..22: mol_type = other DNA
cctacggaaacctgtagggaca

SEQ ID NO: 59575 - DNA, 22 bp, synthetic construct
  misc_feature 1..22: note = chemically synthesized
  source 1..22: mol_type = other DNA
cggaaacctgtagggacaaggc

SEQ ID NO: 59576 - DNA, 22 bp, synthetic construct
  misc_feature 1..22: note = chemically synthesized
  source 1..22: mol_type = other DNA
tagggacaaggccctgggatgt

SEQ ID NO: 59577 - DNA, 22 bp, synthetic construct
  misc_feature 1..22: note = chemically synthesized
  source 1..22: mol_type = other DNA
ggatgttcagtggagcctgagt

SEQ ID NO: 59578 - DNA, 22 bp, synthetic construct
  misc_feature 1..22: note = chemically synthesized
  source 1..22: mol_type = other DNA
agtggagcctgagtcattttat

SEQ ID NO: 59579 - DNA, 22 bp, synthetic construct
  misc_feature 1..22: note = chemically synthesized
  source 1..22: mol_type = other DNA
agtcattttataaaaaagcatg

SEQ ID NO: 59580 - DNA, 22 bp, synthetic construct
  misc_feature 1..22: note = chemically synthesized
  source 1..22: mol_type = other DNA
tataaaaaagcatgactctagg

SEQ ID NO: 59581 - DNA, 22 bp, synthetic construct
  misc_feature 1..22: note = chemically synthesized
  source 1..22: mol_type = other DNA
ataaaaaagcatgactctaggg

SEQ ID NO: 59582 - DNA, 22 bp, synthetic construct
  misc_feature 1..22: note = chemically synthesized
  source 1..22: mol_type = other DNA
taaaaaagcatgactctagggt

SEQ ID NO: 59583 - DNA, 22 bp, synthetic construct
  misc_feature 1..22: note = chemically synthesized
  source 1..22: mol_type = other DNA
tagggtccaaaattcctttgaa

SEQ ID NO: 59584 - DNA, 22 bp, synthetic construct
  misc_feature 1..22: note = chemically synthesized
  source 1..22: mol_type = other DNA
gggtccaaaattcctttgaagc

SEQ ID NO: 59585 - DNA, 22 bp, synthetic construct
  misc_feature 1..22: note = chemically synthesized
  source 1..22: mol_type = other DNA
ctttgaagctgttgctatccag

SEQ ID NO: 59586 - DNA, 22 bp, synthetic construct
  misc_feature 1..22: note = chemically synthesized
  source 1..22: mol_type = other DNA
tgaagctgttgctatccagagt

SEQ ID NO: 59587 - DNA, 22 bp, synthetic construct
  misc_feature 1..22: note = chemically synthesized
  source 1..22: mol_type = other DNA
gaagctgttgctatccagagtg

SEQ ID NO: 59588 - DNA, 22 bp, synthetic construct
  misc_feature 1..22: note = chemically synthesized
  source 1..22: mol_type = other DNA
aagctgttgctatccagagtga

SEQ ID NO: 59589 - DNA, 22 bp, synthetic construct
  misc_feature 1..22: note = chemically synthesized
  source 1..22: mol_type = other DNA
ttgctatccagagtgaagtccc

SEQ ID NO: 59590 - DNA, 22 bp, synthetic construct
  misc_feature 1..22: note = chemically synthesized
  source 1..22: mol_type = other DNA
ctatccagagtgaagtcccttc

SEQ ID NO: 59591 - DNA, 22 bp, synthetic construct
  misc_feature 1..22: note = chemically synthesized
  source 1..22: mol_type = other DNA
tccagagtgaagtcccttcttt

SEQ ID NO: 59592 - DNA, 22 bp, synthetic construct
  misc_feature 1..22: note = chemically synthesized
  source 1..22: mol_type = other DNA
ctttaggacagggtggccctcc

SEQ ID NO: 59593 - DNA, 22 bp, synthetic construct
  misc_feature 1..22: note = chemically synthesized
  source 1..22: mol_type = other DNA
tttaggacagggtggccctcct

SEQ ID NO: 59594 - DNA, 22 bp, synthetic construct
  misc_feature 1..22: note = chemically synthesized
  source 1..22: mol_type = other DNA
taggacagggtggccctcctcc

SEQ ID NO: 59595 - DNA, 22 bp, synthetic construct
  misc_feature 1..22: note = chemically synthesized
  source 1..22: mol_type = other DNA
aggacagggtggccctcctccc

SEQ ID NO: 59596 - DNA, 22 bp, synthetic construct
  misc_feature 1..22: note = chemically synthesized
  source 1..22: mol_type = other DNA
ggacagggtggccctcctccct

SEQ ID NO: 59597 - DNA, 22 bp, synthetic construct
  misc_feature 1..22: note = chemically synthesized
  source 1..22: mol_type = other DNA
ctccctcctggatgtcacatct

SEQ ID NO: 59598 - DNA, 22 bp, synthetic construct
  misc_feature 1..22: note = chemically synthesized
  source 1..22: mol_type = other DNA
cctcctggatgtcacatcttcg

SEQ ID NO: 59599 - DNA, 22 bp, synthetic construct
  misc_feature 1..22: note = chemically synthesized
  source 1..22: mol_type = other DNA
ctggatgtcacatcttcggtgg

SEQ ID NO: 59600 - DNA, 22 bp, synthetic construct
  misc_feature 1..22: note = chemically synthesized
  source 1..22: mol_type = other DNA
gatgtcacatcttcggtggagg

SEQ ID NO: 59601 - DNA, 22 bp, synthetic construct
  misc_feature 1..22: note = chemically synthesized
  source 1..22: mol_type = other DNA
cggtggaggggcagaaagggga

SEQ ID NO: 59602 - DNA, 22 bp, synthetic construct
  misc_feature 1..22: note = chemically synthesized
  source 1..22: mol_type = other DNA
ggtggaggggcagaaaggggac

SEQ ID NO: 59603 - DNA, 22 bp, synthetic construct
  misc_feature 1..22: note = chemically synthesized
  source 1..22: mol_type = other DNA
ggtattctcctcaccctggccc

SEQ ID NO: 59604 - DNA, 22 bp, synthetic construct
  misc_feature 1..22: note = chemically synthesized
  source 1..22: mol_type = other DNA
tcctcaccctggccctagtgct

SEQ ID NO: 59605 - DNA, 22 bp, synthetic construct
  misc_feature 1..22: note = chemically synthesized
  source 1..22: mol_type = other DNA
ctcaccctggccctagtgcttc

SEQ ID NO: 59606 - DNA, 22 bp, synthetic construct
  misc_feature 1..22: note = chemically synthesized
  source 1..22: mol_type = other DNA
accctggccctagtgcttcaaa

SEQ ID NO: 59607 - DNA, 22 bp, synthetic construct
  misc_feature 1..22: note = chemically synthesized
  source 1..22: mol_type = other DNA
gccctagtgcttcaaatcttaa

SEQ ID NO: 59608 - DNA, 22 bp, synthetic construct
  misc_feature 1..22: note = chemically synthesized
  source 1..22: mol_type = other DNA
gtgcttcaaatcttaaaaaaac

SEQ ID NO: 59609 - DNA, 22 bp, synthetic construct
  misc_feature 1..22: note = chemically synthesized
  source 1..22: mol_type = other DNA
caaatcttaaaaaaacgttttt

SEQ ID NO: 59610 - DNA, 22 bp, synthetic construct
  misc_feature 1..22: note = chemically synthesized
  source 1..22: mol_type = other DNA
aaatcttaaaaaaacgttttta

SEQ ID NO: 59611 - DNA, 22 bp, synthetic construct
  misc_feature 1..22: note = chemically synthesized
  source 1..22: mol_type = other DNA
aaaaaaacgtttttatttgtgc

SEQ ID NO: 59612 - DNA, 22 bp, synthetic construct
  misc_feature 1..22: note = chemically synthesized
  source 1..22: mol_type = other DNA
aaaaaacgtttttatttgtgct

SEQ ID NO: 59613 - DNA, 22 bp, synthetic construct
  misc_feature 1..22: note = chemically synthesized
  source 1..22: mol_type = other DNA
ttatttgtgcttctgcaccacc

SEQ ID NO: 59614 - DNA, 22 bp, synthetic construct
  misc_feature 1..22: note = chemically synthesized
  source 1..22: mol_type = other DNA
tatttgtgcttctgcaccacct

SEQ ID NO: 59615 - DNA, 22 bp, synthetic construct
  misc_feature 1..22: note = chemically synthesized
  source 1..22: mol_type = other DNA
atttgtgcttctgcaccacctt

SEQ ID NO: 59616 - DNA, 22 bp, synthetic construct
  misc_feature 1..22: note = chemically synthesized
  source 1..22: mol_type = other DNA
tttgtgcttctgcaccaccttc

SEQ ID NO: 59617 - DNA, 22 bp, synthetic construct
  misc_feature 1..22: note = chemically synthesized
  source 1..22: mol_type = other DNA
gtgcttctgcaccaccttctag

SEQ ID NO: 59618 - DNA, 22 bp, synthetic construct
  misc_feature 1..22: note = chemically synthesized
  source 1..22: mol_type = other DNA
tgcttctgcaccaccttctagc

SEQ ID NO: 59619 - DNA, 22 bp, synthetic construct
  misc_feature 1..22: note = chemically synthesized
  source 1..22: mol_type = other DNA
gaaggtggtgcagaagcacaaa

SEQ ID NO: 59620 - DNA, 22 bp, synthetic construct
  misc_feature 1..22: note = chemically synthesized
  source 1..22: mol_type = other DNA
ttttaagatttgaagcactagg

SEQ ID NO: 59621 - DNA, 22 bp, synthetic construct
  misc_feature 1..22: note = chemically synthesized
  source 1..22: mol_type = other DNA
tttaagatttgaagcactaggg

SEQ ID NO: 59622 - DNA, 22 bp, synthetic construct
  misc_feature 1..22: note = chemically synthesized
  source 1..22: mol_type = other DNA
ttaagatttgaagcactagggc

SEQ ID NO: 59623 - DNA, 22 bp, synthetic construct
  misc_feature 1..22: note = chemically synthesized
  source 1..22: mol_type = other DNA
taagatttgaagcactagggcc

SEQ ID NO: 59624 - DNA, 22 bp, synthetic construct
  misc_feature 1..22: note = chemically synthesized
  source 1..22: mol_type = other DNA
aagatttgaagcactagggcca

SEQ ID NO: 59625 - DNA, 22 bp, synthetic construct
  misc_feature 1..22: note = chemically synthesized
  source 1..22: mol_type = other DNA
agatttgaagcactagggccag

SEQ ID NO: 59626 - DNA, 22 bp, synthetic construct
  misc_feature 1..22: note = chemically synthesized
  source 1..22: mol_type = other DNA
gaagcactagggccagggtgag

SEQ ID NO: 59627 - DNA, 22 bp, synthetic construct
  misc_feature 1..22: note = chemically synthesized
  source 1..22: mol_type = other DNA
aagcactagggccagggtgagg

SEQ ID NO: 59628 - DNA, 22 bp, synthetic construct
  misc_feature 1..22: note = chemically synthesized
  source 1..22: mol_type = other DNA
gggccagggtgaggagaatacc

SEQ ID NO: 59629 - DNA, 22 bp, synthetic construct
  misc_feature 1..22: note = chemically synthesized
  source 1..22: mol_type = other DNA
tctgcccctccaccgaagatgt

SEQ ID NO: 59630 - DNA, 22 bp, synthetic construct
  misc_feature 1..22: note = chemically synthesized
  source 1..22: mol_type = other DNA
ctgcccctccaccgaagatgtg

SEQ ID NO: 59631 - DNA, 22 bp, synthetic construct
  misc_feature 1..22: note = chemically synthesized
  source 1..22: mol_type = other DNA
tgcccctccaccgaagatgtga

SEQ ID NO: 59632 - DNA, 22 bp, synthetic construct
  misc_feature 1..22: note = chemically synthesized
  source 1..22: mol_type = other DNA
cccctccaccgaagatgtgaca

SEQ ID NO: 59633 - DNA, 22 bp, synthetic construct
  misc_feature 1..22: note = chemically synthesized
  source 1..22: mol_type = other DNA
caccgaagatgtgacatccagg

SEQ ID NO: 59634 - DNA, 22 bp, synthetic construct
  misc_feature 1..22: note = chemically synthesized
  source 1..22: mol_type = other DNA
tcctaaagaagggacttcactc

SEQ ID NO: 59635 - DNA, 22 bp, synthetic construct
  misc_feature 1..22: note = chemically synthesized
  source 1..22: mol_type = other DNA
aagaagggacttcactctggat

SEQ ID NO: 59636 - DNA, 22 bp, synthetic construct
  misc_feature 1..22: note = chemically synthesized
  source 1..22: mol_type = other DNA
cactctggatagcaacagcttc

SEQ ID NO: 59637 - DNA, 22 bp, synthetic construct
  misc_feature 1..22: note = chemically synthesized
  source 1..22: mol_type = other DNA
actctggatagcaacagcttca

SEQ ID NO: 59638 - DNA, 22 bp, synthetic construct
  misc_feature 1..22: note = chemically synthesized
  source 1..22: mol_type = other DNA
tggatagcaacagcttcaaagg

SEQ ID NO: 59639 - DNA, 22 bp, synthetic construct
  misc_feature 1..22: note = chemically synthesized
  source 1..22: mol_type = other DNA
gatagcaacagcttcaaaggaa

SEQ ID NO: 59640 - DNA, 22 bp, synthetic construct
  misc_feature 1..22: note = chemically synthesized
  source 1..22: mol_type = other DNA
caaaggaattttggaccctaga

SEQ ID NO: 59641 - DNA, 22 bp, synthetic construct
  misc_feature 1..22: note = chemically synthesized
  source 1..22: mol_type = other DNA
aaaggaattttggaccctagag

SEQ ID NO: 59642 - DNA, 22 bp, synthetic construct
  misc_feature 1..22: note = chemically synthesized
  source 1..22: mol_type = other DNA
tggaccctagagtcatgctttt

SEQ ID NO: 59643 - DNA, 22 bp, synthetic construct
  misc_feature 1..22: note = chemically synthesized
  source 1..22: mol_type = other DNA
ggaccctagagtcatgcttttt

SEQ ID NO: 59644 - DNA, 22 bp, synthetic construct
  misc_feature 1..22: note = chemically synthesized
  source 1..22: mol_type = other DNA
gaccctagagtcatgctttttt

SEQ ID NO: 59645 - DNA, 22 bp, synthetic construct
  misc_feature 1..22: note = chemically synthesized
  source 1..22: mol_type = other DNA
gagtcatgcttttttataaaat

SEQ ID NO: 59646 - DNA, 22 bp, synthetic construct
  misc_feature 1..22: note = chemically synthesized
  source 1..22: mol_type = other DNA
ttttataaaatgactcaggctc

SEQ ID NO: 59647 - DNA, 22 bp, synthetic construct
  misc_feature 1..22: note = chemically synthesized
  source 1..22: mol_type = other DNA
tttataaaatgactcaggctcc

SEQ ID NO: 59648 - DNA, 22 bp, synthetic construct
  misc_feature 1..22: note = chemically synthesized
  source 1..22: mol_type = other DNA
ttataaaatgactcaggctcca

SEQ ID NO: 59649 - DNA, 22 bp, synthetic construct
  misc_feature 1..22: note = chemically synthesized
  source 1..22: mol_type = other DNA
tataaaatgactcaggctccac

SEQ ID NO: 59650 - DNA, 22 bp, synthetic construct
  misc_feature 1..22: note = chemically synthesized
  source 1..22: mol_type = other DNA
ataaaatgactcaggctccact

SEQ ID NO: 59651 - DNA, 22 bp, synthetic construct
  misc_feature 1..22: note = chemically synthesized
  source 1..22: mol_type = other DNA
taaaatgactcaggctccactg

SEQ ID NO: 59652 - DNA, 22 bp, synthetic construct
  misc_feature 1..22: note = chemically synthesized
  source 1..22: mol_type = other DNA
aggctccactgaacatcccagg

SEQ ID NO: 59653 - DNA, 22 bp, synthetic construct
  misc_feature 1..22: note = chemically synthesized
  source 1..22: mol_type = other DNA
cactgaacatcccagggccttg

SEQ ID NO: 59654 - DNA, 22 bp, synthetic construct
  misc_feature 1..22: note = chemically synthesized
  source 1..22: mol_type = other DNA
aacatcccagggccttgtccct

SEQ ID NO: 59655 - DNA, 22 bp, synthetic construct
  misc_feature 1..22: note = chemically synthesized
  source 1..22: mol_type = other DNA
gtccctacaggtttccgtaggc

SEQ ID NO: 59656 - DNA, 22 bp, synthetic construct
  misc_feature 1..22: note = chemically synthesized
  source 1..22: mol_type = other DNA
tccctacaggtttccgtaggca

SEQ ID NO: 59657 - DNA, 22 bp, synthetic construct
  misc_feature 1..22: note = chemically synthesized
  source 1..22: mol_type = other DNA
caggtttccgtaggcagcagat

SEQ ID NO: 59658 - DNA, 22 bp, synthetic construct
  misc_feature 1..22: note = chemically synthesized
  source 1..22: mol_type = other DNA
ccgtaggcagcagatgcattgg

SEQ ID NO: 59659 - DNA, 22 bp, synthetic construct
  misc_feature 1..22: note = chemically synthesized
  source 1..22: mol_type = other DNA
cgtaggcagcagatgcattggc

SEQ ID NO: 59660 - DNA, 22 bp, synthetic construct
  misc_feature 1..22: note = chemically synthesized
  source 1..22: mol_type = other DNA
gcacaagaatggctggcaggca

SEQ ID NO: 59661 - DNA, 22 bp, synthetic construct
  misc_feature 1..22: note = chemically synthesized
  source 1..22: mol_type = other DNA
gcaggcagaccaatgggtttga

SEQ ID NO: 59662 - DNA, 22 bp, synthetic construct
  misc_feature 1..22: note = chemically synthesized
  source 1..22: mol_type = other DNA
gatccaggctctacccctagct

SEQ ID NO: 59663 - DNA, 22 bp, synthetic construct
  misc_feature 1..22: note = chemically synthesized
  source 1..22: mol_type = other DNA
atccaggctctacccctagctg

SEQ ID NO: 59664 - DNA, 22 bp, synthetic construct
  misc_feature 1..22: note = chemically synthesized
  source 1..22: mol_type = other DNA
tacccctagctgtctgtgtggt

SEQ ID NO: 59665 - DNA, 22 bp, synthetic construct
  misc_feature 1..22: note = chemically synthesized
  source 1..22: mol_type = other DNA
cccctagctgtctgtgtggtcc

SEQ ID NO: 59666 - DNA, 22 bp, synthetic construct
  misc_feature 1..22: note = chemically synthesized
  source 1..22: mol_type = other DNA
gctgtctgtgtggtcccctctg

SEQ ID NO: 59667 - DNA, 22 bp, synthetic construct
  misc_feature 1..22: note = chemically synthesized
  source 1..22: mol_type = other DNA
tctgtgtggtcccctctgaact

SEQ ID NO: 59668 - DNA, 22 bp, synthetic construct
  misc_feature 1..22: note = chemically synthesized
  source 1..22: mol_type = other DNA
tgtggtcccctctgaacttcag

SEQ ID NO: 59669 - DNA, 22 bp, synthetic construct
  misc_feature 1..22: note = chemically synthesized
  source 1..22: mol_type = other DNA
tgaacttcagtctcctcgtctt

SEQ ID NO: 59670 - DNA, 22 bp, synthetic construct
  misc_feature 1..22: note = chemically synthesized
  source 1..22: mol_type = other DNA
aacttcagtctcctcgtctttc

SEQ ID NO: 59671 - DNA, 22 bp, synthetic construct
  misc_feature 1..22: note = chemically synthesized
  source 1..22: mol_type = other DNA
cagtctcctcgtctttcaaatg

SEQ ID NO: 59672 - DNA, 22 bp, synthetic construct
  misc_feature 1..22: note = chemically synthesized
  source 1..22: mol_type = other DNA
agtctcctcgtctttcaaatga

SEQ ID NO: 59673 - DNA, 22 bp, synthetic construct
  misc_feature 1..22: note = chemically synthesized
  source 1..22: mol_type = other DNA
ctcgtctttcaaatgaagatag

SEQ ID NO: 59674 - DNA, 22 bp, synthetic construct
  misc_feature 1..22: note = chemically synthesized
  source 1..22: mol_type = other DNA
gtctttcaaatgaagatagacg

SEQ ID NO: 59675 - DNA, 22 bp, synthetic construct
  misc_feature 1..22: note = chemically synthesized
  source 1..22: mol_type = other DNA
tcaaatgaagatagacgtacca

SEQ ID NO: 59676 - DNA, 22 bp, synthetic construct
  misc_feature 1..22: note = chemically synthesized
  source 1..22: mol_type = other DNA
caaatgaagatagacgtaccac

SEQ ID NO: 59677 - DNA, 22 bp, synthetic construct
  misc_feature 1..22: note = chemically synthesized
  source 1..22: mol_type = other DNA
aaatgaagatagacgtaccact

SEQ ID NO: 59678 - DNA, 22 bp, synthetic construct
  misc_feature 1..22: note = chemically synthesized
  source 1..22: mol_type = other DNA
gggcatggccaggcttaaaggg

SEQ ID NO: 59679 - DNA, 22 bp, synthetic construct
  misc_feature 1..22: note = chemically synthesized
  source 1..22: mol_type = other DNA
aaagggaattctatacagaaag

SEQ ID NO: 59680 - DNA, 22 bp, synthetic construct
  misc_feature 1..22: note = chemically synthesized
  source 1..22: mol_type = other DNA
aagggaattctatacagaaagc

SEQ ID NO: 59681 - DNA, 22 bp, synthetic construct
  misc_feature 1..22: note = chemically synthesized
  source 1..22: mol_type = other DNA
tatacagaaagccagtagttac

SEQ ID NO: 59682 - DNA, 22 bp, synthetic construct
  misc_feature 1..22: note = chemically synthesized
  source 1..22: mol_type = other DNA
tacagaaagccagtagttactg

SEQ ID NO: 59683 - DNA, 22 bp, synthetic construct
  misc_feature 1..22: note = chemically synthesized
  source 1..22: mol_type = other DNA
ctgtgcttggtacccgataagt

SEQ ID NO: 59684 - DNA, 22 bp, synthetic construct
  misc_feature 1..22: note = chemically synthesized
  source 1..22: mol_type = other DNA
tgcttggtacccgataagtgct

SEQ ID NO: 59685 - DNA, 22 bp, synthetic construct
  misc_feature 1..22: note = chemically synthesized
  source 1..22: mol_type = other DNA
ggtacccgataagtgctcaata

SEQ ID NO: 59686 - DNA, 22 bp, synthetic construct
  misc_feature 1..22: note = chemically synthesized
  source 1..22: mol_type = other DNA
gtacccgataagtgctcaatac

SEQ ID NO: 59687 - DNA, 22 bp, synthetic construct
  misc_feature 1..22: note = chemically synthesized
  source 1..22: mol_type = other DNA
aatacatacttgctgtcccctt

SEQ ID NO: 59688 - DNA, 22 bp, synthetic construct
  misc_feature 1..22: note = chemically synthesized
  source 1..22: mol_type = other DNA
gctgtccccttctgattttcag

SEQ ID NO: 59689 - DNA, 22 bp, synthetic construct
  misc_feature 1..22: note = chemically synthesized
  source 1..22: mol_type = other DNA
ctgtccccttctgattttcagc

SEQ ID NO: 59690 - DNA, 22 bp, synthetic construct
  misc_feature 1..22: note = chemically synthesized
  source 1..22: mol_type = other DNA
tccccttctgattttcagcaat

SEQ ID NO: 59691 - DNA, 22 bp, synthetic construct
  misc_feature 1..22: note = chemically synthesized
  source 1..22: mol_type = other DNA
ctgattttcagcaatgggccta

SEQ ID NO: 59692 - DNA, 22 bp, synthetic construct
  misc_feature 1..22: note = chemically synthesized
  source 1..22: mol_type = other DNA
tgattttcagcaatgggcctac

SEQ ID NO: 59693 - DNA, 22 bp, synthetic construct
  misc_feature 1..22: note = chemically synthesized
  source 1..22: mol_type = other DNA
attttcagcaatgggcctacta

SEQ ID NO: 59694 - DNA, 22 bp, synthetic construct
  misc_feature 1..22: note = chemically synthesized
  source 1..22: mol_type = other DNA
tcagcaatgggcctactaagca

SEQ ID NO: 59695 - DNA, 22 bp, synthetic construct
  misc_feature 1..22: note = chemically synthesized
  source 1..22: mol_type = other DNA
cagcaatgggcctactaagcac

SEQ ID NO: 59696 - DNA, 22 bp, synthetic construct
  misc_feature 1..22: note = chemically synthesized
  source 1..22: mol_type = other DNA
agcaatgggcctactaagcaca

SEQ ID NO: 59697 - DNA, 22 bp, synthetic construct
  misc_feature 1..22: note = chemically synthesized
  source 1..22: mol_type = other DNA
ctaagcacagtccccagtgtat

SEQ ID NO: 59698 - DNA, 22 bp, synthetic construct
  misc_feature 1..22: note = chemically synthesized
  source 1..22: mol_type = other DNA
agcacagtccccagtgtatatg

SEQ ID NO: 59699 - DNA, 22 bp, synthetic construct
  misc_feature 1..22: note = chemically synthesized
  source 1..22: mol_type = other DNA
tcaggaagtgccattcccaaaa

SEQ ID NO: 59700 - DNA, 22 bp, synthetic construct
  misc_feature 1..22: note = chemically synthesized
  source 1..22: mol_type = other DNA
ccaaaaagggtggctcaccagc

SEQ ID NO: 59701 - DNA, 22 bp, synthetic construct
  misc_feature 1..22: note = chemically synthesized
  source 1..22: mol_type = other DNA
accagctccagcaggtcgccac

SEQ ID NO: 59702 - DNA, 22 bp, synthetic construct
  misc_feature 1..22: note = chemically synthesized
  source 1..22: mol_type = other DNA
cagcaggtcgccactcatcttc

SEQ ID NO: 59703 - DNA, 22 bp, synthetic construct
  misc_feature 1..22: note = chemically synthesized
  source 1..22: mol_type = other DNA
atcttcaccaggaagccaggaa

SEQ ID NO: 59704 - DNA, 22 bp, synthetic construct
  misc_feature 1..22: note = chemically synthesized
  source 1..22: mol_type = other DNA
caccaggaagccaggaagaagg

SEQ ID NO: 59705 - DNA, 22 bp, synthetic construct
  misc_feature 1..22: note = chemically synthesized
  source 1..22: mol_type = other DNA
accaggaagccaggaagaaggc

SEQ ID NO: 59706 - DNA, 22 bp, synthetic construct
  misc_feature 1..22: note = chemically synthesized
  source 1..22: mol_type = other DNA
ggtgaggtatccccggcgggca

SEQ ID NO: 59707 - DNA, 22 bp, synthetic construct
  misc_feature 1..22: note = chemically synthesized
  source 1..22: mol_type = other DNA
gtgaggtatccccggcgggcag

SEQ ID NO: 59708 - DNA, 22 bp, synthetic construct
  misc_feature 1..22: note = chemically synthesized
  source 1..22: mol_type = other DNA
ggcctgcaggcggcgggcagtg

SEQ ID NO: 59709 - DNA, 22 bp, synthetic construct
  misc_feature 1..22: note = chemically synthesized
  source 1..22: mol_type = other DNA
caggcggcgggcagtgcgctct

SEQ ID NO: 59710 - DNA, 22 bp, synthetic construct
  misc_feature 1..22: note = chemically synthesized
  source 1..22: mol_type = other DNA
tgactgcgagaggtgggtctcc

SEQ ID NO: 59711 - DNA, 22 bp, synthetic construct
  misc_feature 1..22: note = chemically synthesized
  source 1..22: mol_type = other DNA
actgcgagaggtgggtctcctc

SEQ ID NO: 59712 - DNA, 22 bp, synthetic construct
  misc_feature 1..22: note = chemically synthesized
  source 1..22: mol_type = other DNA
cgagaggtgggtctcctccttc

SEQ ID NO: 59713 - DNA, 22 bp, synthetic construct
  misc_feature 1..22: note = chemically synthesized
  source 1..22: mol_type = other DNA
ctccttcagcaccaccacgtag

SEQ ID NO: 59714 - DNA, 22 bp, synthetic construct
  misc_feature 1..22: note = chemically synthesized
  source 1..22: mol_type = other DNA
cttcagcaccaccacgtaggtg

SEQ ID NO: 59715 - DNA, 22 bp, synthetic construct
  misc_feature 1..22: note = chemically synthesized
  source 1..22: mol_type = other DNA
cagcaccaccacgtaggtgcca

SEQ ID NO: 59716 - DNA, 22 bp, synthetic construct
  misc_feature 1..22: note = chemically synthesized
  source 1..22: mol_type = other DNA
agcaccaccacgtaggtgccag

SEQ ID NO: 59717 - DNA, 22 bp, synthetic construct
  misc_feature 1..22: note = chemically synthesized
  source 1..22: mol_type = other DNA
cacggatcctggccccatgcaa

SEQ ID NO: 59718 - DNA, 22 bp, synthetic construct
  misc_feature 1..22: note = chemically synthesized
  source 1..22: mol_type = other DNA
gccccatgcaaggaggaacatg

SEQ ID NO: 59719 - DNA, 22 bp, synthetic construct
  misc_feature 1..22: note = chemically synthesized
  source 1..22: mol_type = other DNA
ggtgtactttatctcaccccta

SEQ ID NO: 59720 - DNA, 22 bp, synthetic construct
  misc_feature 1..22: note = chemically synthesized
  source 1..22: mol_type = other DNA
tatctcacccctacttacaaat

SEQ ID NO: 59721 - DNA, 22 bp, synthetic construct
  misc_feature 1..22: note = chemically synthesized
  source 1..22: mol_type = other DNA
atctcacccctacttacaaatt

SEQ ID NO: 59722 - DNA, 22 bp, synthetic construct
  misc_feature 1..22: note = chemically synthesized
  source 1..22: mol_type = other DNA
tctcacccctacttacaaatta

SEQ ID NO: 59723 - DNA, 22 bp, synthetic construct
  misc_feature 1..22: note = chemically synthesized
  source 1..22: mol_type = other DNA
acccctacttacaaattacaac

SEQ ID NO: 59724 - DNA, 22 bp, synthetic construct
  misc_feature 1..22: note = chemically synthesized
  source 1..22: mol_type = other DNA
cttacaaattacaacaaaagag

SEQ ID NO: 59725 - DNA, 22 bp, synthetic construct
  misc_feature 1..22: note = chemically synthesized
  source 1..22: mol_type = other DNA
acaaattacaacaaaagagaca

SEQ ID NO: 59726 - DNA, 22 bp, synthetic construct
  misc_feature 1..22: note = chemically synthesized
  source 1..22: mol_type = other DNA
caaattacaacaaaagagacac

SEQ ID NO: 59727 - DNA, 22 bp, synthetic construct
  misc_feature 1..22: note = chemically synthesized
  source 1..22: mol_type = other DNA
caacaaaagagacacaacagag

SEQ ID NO: 59728 - DNA, 22 bp, synthetic construct
  misc_feature 1..22: note = chemically synthesized
  source 1..22: mol_type = other DNA
ccaaatgcggaccaaaaagcaa

SEQ ID NO: 59729 - DNA, 22 bp, synthetic construct
  misc_feature 1..22: note = chemically synthesized
  source 1..22: mol_type = other DNA
aagaactcatataggccaacta

SEQ ID NO: 59730 - DNA, 22 bp, synthetic construct
  misc_feature 1..22: note = chemically synthesized
  source 1..22: mol_type = other DNA
atataggccaactattattatt

SEQ ID NO: 59731 - DNA, 22 bp, synthetic construct
  misc_feature 1..22: note = chemically synthesized
  source 1..22: mol_type = other DNA
ttattattcacatggttatata

SEQ ID NO: 59732 - DNA, 22 bp, synthetic construct
  misc_feature 1..22: note = chemically synthesized
  source 1..22: mol_type = other DNA
ttattcacatggttatataaca

SEQ ID NO: 59733 - DNA, 22 bp, synthetic construct
  misc_feature 1..22: note = chemically synthesized
  source 1..22: mol_type = other DNA
ttcacatggttatataacactt

SEQ ID NO: 59734 - DNA, 22 bp, synthetic construct
  misc_feature 1..22: note = chemically synthesized
  source 1..22: mol_type = other DNA
acatggttatataacactttca

SEQ ID NO: 59735 - DNA, 22 bp, synthetic construct
  misc_feature 1..22: note = chemically synthesized
  source 1..22: mol_type = other DNA
tataacactttcaaatgtgcca

SEQ ID NO: 59736 - DNA, 22 bp, synthetic construct
  misc_feature 1..22: note = chemically synthesized
  source 1..22: mol_type = other DNA
tcaaatgtgccattcaggcaaa

SEQ ID NO: 59737 - DNA, 22 bp, synthetic construct
  misc_feature 1..22: note = chemically synthesized
  source 1..22: mol_type = other DNA
caaatgtgccattcaggcaaaa

SEQ ID NO: 59738 - DNA, 22 bp, synthetic construct
  misc_feature 1..22: note = chemically synthesized
  source 1..22: mol_type = other DNA
aaatgtgccattcaggcaaaaa

SEQ ID NO: 59739 - DNA, 22 bp, synthetic construct
  misc_feature 1..22: note = chemically synthesized
  source 1..22: mol_type = other DNA
aggcaaaaatgggaactacggg

SEQ ID NO: 59740 - DNA, 22 bp, synthetic construct
  misc_feature 1..22: note = chemically synthesized
  source 1..22: mol_type = other DNA
cgggccacactcgacaacaggt

SEQ ID NO: 59741 - DNA, 22 bp, synthetic construct
  misc_feature 1..22: note = chemically synthesized
  source 1..22: mol_type = other DNA
gacaacaggttttcctctgtac

SEQ ID NO: 59742 - DNA, 22 bp, synthetic construct
  misc_feature 1..22: note = chemically synthesized
  source 1..22: mol_type = other DNA
tcctctgtacctgcacccagct

SEQ ID NO: 59743 - DNA, 22 bp, synthetic construct
  misc_feature 1..22: note = chemically synthesized
  source 1..22: mol_type = other DNA
cctctgtacctgcacccagctc

SEQ ID NO: 59744 - DNA, 22 bp, synthetic construct
  misc_feature 1..22: note = chemically synthesized
  source 1..22: mol_type = other DNA
ctctgtacctgcacccagctct

SEQ ID NO: 59745 - DNA, 22 bp, synthetic construct
  misc_feature 1..22: note = chemically synthesized
  source 1..22: mol_type = other DNA
tgtacctgcacccagctctcta

SEQ ID NO: 59746 - DNA, 22 bp, synthetic construct
  misc_feature 1..22: note = chemically synthesized
  source 1..22: mol_type = other DNA
tacctgcacccagctctctacg

SEQ ID NO: 59747 - DNA, 22 bp, synthetic construct
  misc_feature 1..22: note = chemically synthesized
  source 1..22: mol_type = other DNA
cacccagctctctacgggcctg

SEQ ID NO: 59748 - DNA, 22 bp, synthetic construct
  misc_feature 1..22: note = chemically synthesized
  source 1..22: mol_type = other DNA
tctacgggcctggtcgctcctg

SEQ ID NO: 59749 - DNA, 22 bp, synthetic construct
  misc_feature 1..22: note = chemically synthesized
  source 1..22: mol_type = other DNA
tacgggcctggtcgctcctggt

SEQ ID NO: 59750 - DNA, 22 bp, synthetic construct
  misc_feature 1..22: note = chemically synthesized
  source 1..22: mol_type = other DNA
cgggcctggtcgctcctggtgg

SEQ ID NO: 59751 - DNA, 22 bp, synthetic construct
  misc_feature 1..22: note = chemically synthesized
  source 1..22: mol_type = other DNA
gtcgctcctggtggccctgccc

SEQ ID NO: 59752 - DNA, 22 bp, synthetic construct
  misc_feature 1..22: note = chemically synthesized
  source 1..22: mol_type = other DNA
ctggtggccctgcccaaaggcc

SEQ ID NO: 59753 - DNA, 22 bp, synthetic construct
  misc_feature 1..22: note = chemically synthesized
  source 1..22: mol_type = other DNA
gtggccctgcccaaaggccacc

SEQ ID NO: 59754 - DNA, 22 bp, synthetic construct
  misc_feature 1..22: note = chemically synthesized
  source 1..22: mol_type = other DNA
cccaaaggccaccccctccccc

SEQ ID NO: 59755 - DNA, 22 bp, synthetic construct
  misc_feature 1..22: note = chemically synthesized
  source 1..22: mol_type = other DNA
ccccatgccccagtcagaataa

SEQ ID NO: 59756 - DNA, 22 bp, synthetic construct
  misc_feature 1..22: note = chemically synthesized
  source 1..22: mol_type = other DNA
agggaaaaaatcatgggctttg

SEQ ID NO: 59757 - DNA, 22 bp, synthetic construct
  misc_feature 1..22: note = chemically synthesized
  source 1..22: mol_type = other DNA
tggagccaggaaaccgtggacc

SEQ ID NO: 59758 - DNA, 22 bp, synthetic construct
  misc_feature 1..22: note = chemically synthesized
  source 1..22: mol_type = other DNA
ggagccaggaaaccgtggacct

SEQ ID NO: 59759 - DNA, 22 bp, synthetic construct
  misc_feature 1..22: note = chemically synthesized
  source 1..22: mol_type = other DNA
gagccaggaaaccgtggacctg

SEQ ID NO: 59760 - DNA, 22 bp, synthetic construct
  misc_feature 1..22: note = chemically synthesized
  source 1..22: mol_type = other DNA
aattccagctccaatatttact

SEQ ID NO: 59761 - DNA, 22 bp, synthetic construct
  misc_feature 1..22: note = chemically synthesized
  source 1..22: mol_type = other DNA
cagctccaatatttactggttg

SEQ ID NO: 59762 - DNA, 22 bp, synthetic construct
  misc_feature 1..22: note = chemically synthesized
  source 1..22: mol_type = other DNA
caatatttactggttgtgcagc

SEQ ID NO: 59763 - DNA, 22 bp, synthetic construct
  misc_feature 1..22: note = chemically synthesized
  source 1..22: mol_type = other DNA
actggttgtgcagccatgagca

SEQ ID NO: 59764 - DNA, 22 bp, synthetic construct
  misc_feature 1..22: note = chemically synthesized
  source 1..22: mol_type = other DNA
ctggttgtgcagccatgagcaa

SEQ ID NO: 59765 - DNA, 22 bp, synthetic construct
  misc_feature 1..22: note = chemically synthesized
  source 1..22: mol_type = other DNA
gttgtgcagccatgagcaagtc

SEQ ID NO: 59766 - DNA, 22 bp, synthetic construct
  misc_feature 1..22: note = chemically synthesized
  source 1..22: mol_type = other DNA
tgcagccatgagcaagtcactc

SEQ ID NO: 59767 - DNA, 22 bp, synthetic construct
  misc_feature 1..22: note = chemically synthesized
  source 1..22: mol_type = other DNA
aacctctcggagcctcagatac

SEQ ID NO: 59768 - DNA, 22 bp, synthetic construct
  misc_feature 1..22: note = chemically synthesized
  source 1..22: mol_type = other DNA
tcggagcctcagatacctctgc

SEQ ID NO: 59769 - DNA, 22 bp, synthetic construct
  misc_feature 1..22: note = chemically synthesized
  source 1..22: mol_type = other DNA
ggagcctcagatacctctgctg

SEQ ID NO: 59770 - DNA, 22 bp, synthetic construct
  misc_feature 1..22: note = chemically synthesized
  source 1..22: mol_type = other DNA
agatacctctgctgtattgtag

SEQ ID NO: 59771 - DNA, 22 bp, synthetic construct
  misc_feature 1..22: note = chemically synthesized
  source 1..22: mol_type = other DNA
tgctgtattgtagagaccacag

SEQ ID NO: 59772 - DNA, 22 bp, synthetic construct
  misc_feature 1..22: note = chemically synthesized
  source 1..22: mol_type = other DNA
ctgtattgtagagaccacagta

SEQ ID NO: 59773 - DNA, 22 bp, synthetic construct
  misc_feature 1..22: note = chemically synthesized
  source 1..22: mol_type = other DNA
tattgtagagaccacagtacct

SEQ ID NO: 59774 - DNA, 22 bp, synthetic construct
  misc_feature 1..22: note = chemically synthesized
  source 1..22: mol_type = other DNA
tagagaccacagtacctatgac

SEQ ID NO: 59775 - DNA, 22 bp, synthetic construct
  misc_feature 1..22: note = chemically synthesized
  source 1..22: mol_type = other DNA
tgacataggcctgctgggaaag

SEQ ID NO: 59776 - DNA, 22 bp, synthetic construct
  misc_feature 1..22: note = chemically synthesized
  source 1..22: mol_type = other DNA
ctgggaaagtcaagagtgacgg

SEQ ID NO: 59777 - DNA, 22 bp, synthetic construct
  misc_feature 1..22: note = chemically synthesized
  source 1..22: mol_type = other DNA
ggaaagtcaagagtgacggtta

SEQ ID NO: 59778 - DNA, 22 bp, synthetic construct
  misc_feature 1..22: note = chemically synthesized
  source 1..22: mol_type = other DNA
tataaatctcccatccagatgc

SEQ ID NO: 59779 - DNA, 22 bp, synthetic construct
  misc_feature 1..22: note = chemically synthesized
  source 1..22: mol_type = other DNA
ccatccagatgctctacaaatg

SEQ ID NO: 59780 - DNA, 22 bp, synthetic construct
  misc_feature 1..22: note = chemically synthesized
  source 1..22: mol_type = other DNA
tacaaatgcaggcagaagggat

SEQ ID NO: 59781 - DNA, 22 bp, synthetic construct
  misc_feature 1..22: note = chemically synthesized
  source 1..22: mol_type = other DNA
caaatgcaggcagaagggatga

SEQ ID NO: 59782 - DNA, 22 bp, synthetic construct
  misc_feature 1..22: note = chemically synthesized
  source 1..22: mol_type = other DNA
agtgagcaaaggcaacacttct

SEQ ID NO: 59783 - DNA, 22 bp, synthetic construct
  misc_feature 1..22: note = chemically synthesized
  source 1..22: mol_type = other DNA
cttaaagagagagaaaagtcaa

SEQ ID NO: 59784 - DNA, 22 bp, synthetic construct
  misc_feature 1..22: note = chemically synthesized
  source 1..22: mol_type = other DNA
ttaaagagagagaaaagtcaag

SEQ ID NO: 59785 - DNA, 22 bp, synthetic construct
  misc_feature 1..22: note = chemically synthesized
  source 1..22: mol_type = other DNA
aaagagagagaaaagtcaaggc

SEQ ID NO: 59786 - DNA, 22 bp, synthetic construct
  misc_feature 1..22: note = chemically synthesized
  source 1..22: mol_type = other DNA
aagagagagaaaagtcaaggcc

SEQ ID NO: 59787 - DNA, 22 bp, synthetic construct
  misc_feature 1..22: note = chemically synthesized
  source 1..22: mol_type = other DNA
tcttagtccttttgtgttgcta

SEQ ID NO: 59788 - DNA, 22 bp, synthetic construct
  misc_feature 1..22: note = chemically synthesized
  source 1..22: mol_type = other DNA
agtccttttgtgttgctatata

SEQ ID NO: 59789 - DNA, 22 bp, synthetic construct
  misc_feature 1..22: note = chemically synthesized
  source 1..22: mol_type = other DNA
gtccttttgtgttgctatataa

SEQ ID NO: 59790 - DNA, 22 bp, synthetic construct
  misc_feature 1..22: note = chemically synthesized
  source 1..22: mol_type = other DNA
ttgtgttgctatataaaggaat

SEQ ID NO: 59791 - DNA, 22 bp, synthetic construct
  misc_feature 1..22: note = chemically synthesized
  source 1..22: mol_type = other DNA
tgtgttgctatataaaggaata

SEQ ID NO: 59792 - DNA, 22 bp, synthetic construct
  misc_feature 1..22: note = chemically synthesized
  source 1..22: mol_type = other DNA
gtgttgctatataaaggaatac

SEQ ID NO: 59793 - DNA, 22 bp, synthetic construct
  misc_feature 1..22: note = chemically synthesized
  source 1..22: mol_type = other DNA
tgttgctatataaaggaatacc

SEQ ID NO: 59794 - DNA, 22 bp, synthetic construct
  misc_feature 1..22: note = chemically synthesized
  source 1..22: mol_type = other DNA
ctatataaaggaatacctgaag

SEQ ID NO: 59795 - DNA, 22 bp, synthetic construct
  misc_feature 1..22: note = chemically synthesized
  source 1..22: mol_type = other DNA
tataaaggaatacctgaaggtg

SEQ ID NO: 59796 - DNA, 22 bp, synthetic construct
  misc_feature 1..22: note = chemically synthesized
  source 1..22: mol_type = other DNA
aaggtgagtaatttacaaggaa

SEQ ID NO: 59797 - DNA, 22 bp, synthetic construct
  misc_feature 1..22: note = chemically synthesized
  source 1..22: mol_type = other DNA
acaaggaaaagggatttattca

SEQ ID NO: 59798 - DNA, 22 bp, synthetic construct
  misc_feature 1..22: note = chemically synthesized
  source 1..22: mol_type = other DNA
caaggaaaagggatttattcag

SEQ ID NO: 59799 - DNA, 22 bp, synthetic construct
  misc_feature 1..22: note = chemically synthesized
  source 1..22: mol_type = other DNA
attcagctcatgattctgcaag

SEQ ID NO: 59800 - DNA, 22 bp, synthetic construct
  misc_feature 1..22: note = chemically synthesized
  source 1..22: mol_type = other DNA
ttcagctcatgattctgcaagc

SEQ ID NO: 59801 - DNA, 22 bp, synthetic construct
  misc_feature 1..22: note = chemically synthesized
  source 1..22: mol_type = other DNA
agctcatgattctgcaagctct

SEQ ID NO: 59802 - DNA, 22 bp, synthetic construct
  misc_feature 1..22: note = chemically synthesized
  source 1..22: mol_type = other DNA
atgattctgcaagctctccagg

SEQ ID NO: 59803 - DNA, 22 bp, synthetic construct
  misc_feature 1..22: note = chemically synthesized
  source 1..22: mol_type = other DNA
tgcaagctctccaggaagcatg

SEQ ID NO: 59804 - DNA, 22 bp, synthetic construct
  misc_feature 1..22: note = chemically synthesized
  source 1..22: mol_type = other DNA
caagctctccaggaagcatggc

SEQ ID NO: 59805 - DNA, 22 bp, synthetic construct
  misc_feature 1..22: note = chemically synthesized
  source 1..22: mol_type = other DNA
tccaggaagcatggcaccagca

SEQ ID NO: 59806 - DNA, 22 bp, synthetic construct
  misc_feature 1..22: note = chemically synthesized
  source 1..22: mol_type = other DNA
caggaagcatggcaccagcatc

SEQ ID NO: 59807 - DNA, 22 bp, synthetic construct
  misc_feature 1..22: note = chemically synthesized
  source 1..22: mol_type = other DNA
cttctggtgagggccttaagct

SEQ ID NO: 59808 - DNA, 22 bp, synthetic construct
  misc_feature 1..22: note = chemically synthesized
  source 1..22: mol_type = other DNA
ctggtgagggccttaagctgct

SEQ ID NO: 59809 - DNA, 22 bp, synthetic construct
  misc_feature 1..22: note = chemically synthesized
  source 1..22: mol_type = other DNA
tggtgagggccttaagctgctt

SEQ ID NO: 59810 - DNA, 22 bp, synthetic construct
  misc_feature 1..22: note = chemically synthesized
  source 1..22: mol_type = other DNA
gtgagggccttaagctgctttc

SEQ ID NO: 59811 - DNA, 22 bp, synthetic construct
  misc_feature 1..22: note = chemically synthesized
  source 1..22: mol_type = other DNA
aagctgctttcactgatggcag

SEQ ID NO: 59812 - DNA, 22 bp, synthetic construct
  misc_feature 1..22: note = chemically synthesized
  source 1..22: mol_type = other DNA
agctgctttcactgatggcaga

SEQ ID NO: 59813 - DNA, 22 bp, synthetic construct
  misc_feature 1..22: note = chemically synthesized
  source 1..22: mol_type = other DNA
ctttcactgatggcagaaggtg

SEQ ID NO: 59814 - DNA, 22 bp, synthetic construct
  misc_feature 1..22: note = chemically synthesized
  source 1..22: mol_type = other DNA
tcactgatggcagaaggtgaag

SEQ ID NO: 59815 - DNA, 22 bp, synthetic construct
  misc_feature 1..22: note = chemically synthesized
  source 1..22: mol_type = other DNA
cactgatggcagaaggtgaagg

SEQ ID NO: 59816 - DNA, 22 bp, synthetic construct
  misc_feature 1..22: note = chemically synthesized
  source 1..22: mol_type = other DNA
actgatggcagaaggtgaaggg

SEQ ID NO: 59817 - DNA, 22 bp, synthetic construct
  misc_feature 1..22: note = chemically synthesized
  source 1..22: mol_type = other DNA
atggcagaaggtgaaggggagc

SEQ ID NO: 59818 - DNA, 22 bp, synthetic construct
  misc_feature 1..22: note = chemically synthesized
  source 1..22: mol_type = other DNA
catgtgcagagatcaatcacat

SEQ ID NO: 59819 - DNA, 22 bp, synthetic construct
  misc_feature 1..22: note = chemically synthesized
  source 1..22: mol_type = other DNA
tttttaataatcagccttcaag

SEQ ID NO: 59820 - DNA, 22 bp, synthetic construct
  misc_feature 1..22: note = chemically synthesized
  source 1..22: mol_type = other DNA
tttaataatcagccttcaaggg

SEQ ID NO: 59821 - DNA, 22 bp, synthetic construct
  misc_feature 1..22: note = chemically synthesized
  source 1..22: mol_type = other DNA
ttaataatcagccttcaaggga

SEQ ID NO: 59822 - DNA, 22 bp, synthetic construct
  misc_feature 1..22: note = chemically synthesized
  source 1..22: mol_type = other DNA
taataatcagccttcaagggaa

SEQ ID NO: 59823 - DNA, 22 bp, synthetic construct
  misc_feature 1..22: note = chemically synthesized
  source 1..22: mol_type = other DNA
aataatcagccttcaagggaaa

SEQ ID NO: 59824 - DNA, 22 bp, synthetic construct
  misc_feature 1..22: note = chemically synthesized
  source 1..22: mol_type = other DNA
ataatcagccttcaagggaaat

SEQ ID NO: 59825 - DNA, 22 bp, synthetic construct
  misc_feature 1..22: note = chemically synthesized
  source 1..22: mol_type = other DNA
caagggaaatcatagcgggaga

SEQ ID NO: 59826 - DNA, 22 bp, synthetic construct
  misc_feature 1..22: note = chemically synthesized
  source 1..22: mol_type = other DNA
aagggaaatcatagcgggagaa

SEQ ID NO: 59827 - DNA, 22 bp, synthetic construct
  misc_feature 1..22: note = chemically synthesized
  source 1..22: mol_type = other DNA
actcattatcacaaggacggca

SEQ ID NO: 59828 - DNA, 22 bp, synthetic construct
  misc_feature 1..22: note = chemically synthesized
  source 1..22: mol_type = other DNA
ctcattatcacaaggacggcac

SEQ ID NO: 59829 - DNA, 22 bp, synthetic construct
  misc_feature 1..22: note = chemically synthesized
  source 1..22: mol_type = other DNA
attatcacaaggacggcaccaa

SEQ ID NO: 59830 - DNA, 22 bp, synthetic construct
  misc_feature 1..22: note = chemically synthesized
  source 1..22: mol_type = other DNA
tcacaaggacggcaccaagcct

SEQ ID NO: 59831 - DNA, 22 bp, synthetic construct
  misc_feature 1..22: note = chemically synthesized
  source 1..22: mol_type = other DNA
tcacaggggttcctcccccatg

SEQ ID NO: 59832 - DNA, 22 bp, synthetic construct
  misc_feature 1..22: note = chemically synthesized
  source 1..22: mol_type = other DNA
cacaggggttcctcccccatga

SEQ ID NO: 59833 - DNA, 22 bp, synthetic construct
  misc_feature 1..22: note = chemically synthesized
  source 1..22: mol_type = other DNA
acaggggttcctcccccatgac

SEQ ID NO: 59834 - DNA, 22 bp, synthetic construct
  misc_feature 1..22: note = chemically synthesized
  source 1..22: mol_type = other DNA
ctcccccatgacccaaacacct

SEQ ID NO: 59835 - DNA, 22 bp, synthetic construct
  misc_feature 1..22: note = chemically synthesized
  source 1..22: mol_type = other DNA
ccccatgacccaaacacctccc

SEQ ID NO: 59836 - DNA, 22 bp, synthetic construct
  misc_feature 1..22: note = chemically synthesized
  source 1..22: mol_type = other DNA
ccattaggccccacttccaaca

SEQ ID NO: 59837 - DNA, 22 bp, synthetic construct
  misc_feature 1..22: note = chemically synthesized
  source 1..22: mol_type = other DNA
ggccccacttccaacactgagg

SEQ ID NO: 59838 - DNA, 22 bp, synthetic construct
  misc_feature 1..22: note = chemically synthesized
  source 1..22: mol_type = other DNA
ccaacactgaggaccaaatttc

SEQ ID NO: 59839 - DNA, 22 bp, synthetic construct
  misc_feature 1..22: note = chemically synthesized
  source 1..22: mol_type = other DNA
caacactgaggaccaaatttcc

SEQ ID NO: 59840 - DNA, 22 bp, synthetic construct
  misc_feature 1..22: note = chemically synthesized
  source 1..22: mol_type = other DNA
aggaccaaatttccacatgaga

SEQ ID NO: 59841 - DNA, 22 bp, synthetic construct
  misc_feature 1..22: note = chemically synthesized
  source 1..22: mol_type = other DNA
ccacatgagatttggaggggac

SEQ ID NO: 59842 - DNA, 22 bp, synthetic construct
  misc_feature 1..22: note = chemically synthesized
  source 1..22: mol_type = other DNA
cacatgagatttggaggggaca

SEQ ID NO: 59843 - DNA, 22 bp, synthetic construct
  misc_feature 1..22: note = chemically synthesized
  source 1..22: mol_type = other DNA
ggaggggacaaacaaattatag

SEQ ID NO: 59844 - DNA, 22 bp, synthetic construct
  misc_feature 1..22: note = chemically synthesized
  source 1..22: mol_type = other DNA
gaggggacaaacaaattatagc

SEQ ID NO: 59845 - DNA, 22 bp, synthetic construct
  misc_feature 1..22: note = chemically synthesized
  source 1..22: mol_type = other DNA
tagcagccactatctatggtga

SEQ ID NO: 59846 - DNA, 22 bp, synthetic construct
  misc_feature 1..22: note = chemically synthesized
  source 1..22: mol_type = other DNA
tctatggtgatttgtttggttt

SEQ ID NO: 59847 - DNA, 22 bp, synthetic construct
  misc_feature 1..22: note = chemically synthesized
  source 1..22: mol_type = other DNA
tggtgatttgtttggtttttag

SEQ ID NO: 59848 - DNA, 22 bp, synthetic construct
  misc_feature 1..22: note = chemically synthesized
  source 1..22: mol_type = other DNA
gtttggtttttagctcttgtct

SEQ ID NO: 59849 - DNA, 22 bp, synthetic construct
  misc_feature 1..22: note = chemically synthesized
  source 1..22: mol_type = other DNA
tttggtttttagctcttgtctg

SEQ ID NO: 59850 - DNA, 22 bp, synthetic construct
  misc_feature 1..22: note = chemically synthesized
  source 1..22: mol_type = other DNA
ggtttttagctcttgtctgctc

SEQ ID NO: 59851 - DNA, 22 bp, synthetic construct
  misc_feature 1..22: note = chemically synthesized
  source 1..22: mol_type = other DNA
gtttttagctcttgtctgctcc

SEQ ID NO: 59852 - DNA, 22 bp, synthetic construct
  misc_feature 1..22: note = chemically synthesized
  source 1..22: mol_type = other DNA
ttagctcttgtctgctccaact

SEQ ID NO: 59853 - DNA, 22 bp, synthetic construct
  misc_feature 1..22: note = chemically synthesized
  source 1..22: mol_type = other DNA
tagctcttgtctgctccaactg

SEQ ID NO: 59854 - DNA, 22 bp, synthetic construct
  misc_feature 1..22: note = chemically synthesized
  source 1..22: mol_type = other DNA
agctcttgtctgctccaactgc

SEQ ID NO: 59855 - DNA, 22 bp, synthetic construct
  misc_feature 1..22: note = chemically synthesized
  source 1..22: mol_type = other DNA
gctcttgtctgctccaactgct

SEQ ID NO: 59856 - DNA, 22 bp, synthetic construct
  misc_feature 1..22: note = chemically synthesized
  source 1..22: mol_type = other DNA
ttgtctgctccaactgctctca

SEQ ID NO: 59857 - DNA, 22 bp, synthetic construct
  misc_feature 1..22: note = chemically synthesized
  source 1..22: mol_type = other DNA
gtctgctccaactgctctcagg

SEQ ID NO: 59858 - DNA, 22 bp, synthetic construct
  misc_feature 1..22: note = chemically synthesized
  source 1..22: mol_type = other DNA
tctgctccaactgctctcaggc

SEQ ID NO: 59859 - DNA, 22 bp, synthetic construct
  misc_feature 1..22: note = chemically synthesized
  source 1..22: mol_type = other DNA
ctccaactgctctcaggcagac

SEQ ID NO: 59860 - DNA, 22 bp, synthetic construct
  misc_feature 1..22: note = chemically synthesized
  source 1..22: mol_type = other DNA
caactgctctcaggcagacata

SEQ ID NO: 59861 - DNA, 22 bp, synthetic construct
  misc_feature 1..22: note = chemically synthesized
  source 1..22: mol_type = other DNA
ctctcaggcagacatacctgct

SEQ ID NO: 59862 - DNA, 22 bp, synthetic construct
  misc_feature 1..22: note = chemically synthesized
  source 1..22: mol_type = other DNA
tcaggcagacatacctgcttaa

SEQ ID NO: 59863 - DNA, 22 bp, synthetic construct
  misc_feature 1..22: note = chemically synthesized
  source 1..22: mol_type = other DNA
aggcagacatacctgcttaaga

SEQ ID NO: 59864 - DNA, 22 bp, synthetic construct
  misc_feature 1..22: note = chemically synthesized
  source 1..22: mol_type = other DNA
cttaagaaccttcactggctcc

SEQ ID NO: 59865 - DNA, 22 bp, synthetic construct
  misc_feature 1..22: note = chemically synthesized
  source 1..22: mol_type = other DNA
aagaaccttcactggctcccca

SEQ ID NO: 59866 - DNA, 22 bp, synthetic construct
  misc_feature 1..22: note = chemically synthesized
  source 1..22: mol_type = other DNA
agaaccttcactggctccccac

SEQ ID NO: 59867 - DNA, 22 bp, synthetic construct
  misc_feature 1..22: note = chemically synthesized
  source 1..22: mol_type = other DNA
cactggctccccacagcctcat

SEQ ID NO: 59868 - DNA, 22 bp, synthetic construct
  misc_feature 1..22: note = chemically synthesized
  source 1..22: mol_type = other DNA
actggctccccacagcctcatg

SEQ ID NO: 59869 - DNA, 22 bp, synthetic construct
  misc_feature 1..22: note = chemically synthesized
  source 1..22: mol_type = other DNA
gctccccacagcctcatgaatc

SEQ ID NO: 59870 - DNA, 22 bp, synthetic construct
  misc_feature 1..22: note = chemically synthesized
  source 1..22: mol_type = other DNA
cccacagcctcatgaatcaagt

SEQ ID NO: 59871 - DNA, 22 bp, synthetic construct
  misc_feature 1..22: note = chemically synthesized
  source 1..22: mol_type = other DNA
atgaatcaagtccaaactccat

SEQ ID NO: 59872 - DNA, 22 bp, synthetic construct
  misc_feature 1..22: note = chemically synthesized
  source 1..22: mol_type = other DNA
catgctcctccttggcccctac

SEQ ID NO: 59873 - DNA, 22 bp, synthetic construct
  misc_feature 1..22: note = chemically synthesized
  source 1..22: mol_type = other DNA
ctccttggcccctacctcaacc

SEQ ID NO: 59874 - DNA, 22 bp, synthetic construct
  misc_feature 1..22: note = chemically synthesized
  source 1..22: mol_type = other DNA
cttggcccctacctcaacctac

SEQ ID NO: 59875 - DNA, 22 bp, synthetic construct
  misc_feature 1..22: note = chemically synthesized
  source 1..22: mol_type = other DNA
ggcccctacctcaacctacctt

SEQ ID NO: 59876 - DNA, 22 bp, synthetic construct
  misc_feature 1..22: note = chemically synthesized
  source 1..22: mol_type = other DNA
gcccctacctcaacctaccttg

SEQ ID NO: 59877 - DNA, 22 bp, synthetic construct
  misc_feature 1..22: note = chemically synthesized
  source 1..22: mol_type = other DNA
cctcaacctaccttgcagcccc

SEQ ID NO: 59878 - DNA, 22 bp, synthetic construct
  misc_feature 1..22: note = chemically synthesized
  source 1..22: mol_type = other DNA
aacctaccttgcagccccatca

SEQ ID NO: 59879 - DNA, 22 bp, synthetic construct
  misc_feature 1..22: note = chemically synthesized
  source 1..22: mol_type = other DNA
ccttgcagccccatcacccata

SEQ ID NO: 59880 - DNA, 22 bp, synthetic construct
  misc_feature 1..22: note = chemically synthesized
  source 1..22: mol_type = other DNA
gcagccccatcacccatatctc

SEQ ID NO: 59881 - DNA, 22 bp, synthetic construct
  misc_feature 1..22: note = chemically synthesized
  source 1..22: mol_type = other DNA
cagccccatcacccatatctct

SEQ ID NO: 59882 - DNA, 22 bp, synthetic construct
  misc_feature 1..22: note = chemically synthesized
  source 1..22: mol_type = other DNA
tgtatatatgcatcttggactc

SEQ ID NO: 59883 - DNA, 22 bp, synthetic construct
  misc_feature 1..22: note = chemically synthesized
  source 1..22: mol_type = other DNA
tatatatgcatcttggactcca

SEQ ID NO: 59884 - DNA, 22 bp, synthetic construct
  misc_feature 1..22: note = chemically synthesized
  source 1..22: mol_type = other DNA
ggactccagtcagagtagaaca

SEQ ID NO: 59885 - DNA, 22 bp, synthetic construct
  misc_feature 1..22: note = chemically synthesized
  source 1..22: mol_type = other DNA
gactccagtcagagtagaacag

SEQ ID NO: 59886 - DNA, 22 bp, synthetic construct
  misc_feature 1..22: note = chemically synthesized
  source 1..22: mol_type = other DNA
cagtcagagtagaacagagtcc

SEQ ID NO: 59887 - DNA, 22 bp, synthetic construct
  misc_feature 1..22: note = chemically synthesized
  source 1..22: mol_type = other DNA
tacccaaagccttagggccaaa

SEQ ID NO: 59888 - DNA, 22 bp, synthetic construct
  misc_feature 1..22: note = chemically synthesized
  source 1..22: mol_type = other DNA
acccaaagccttagggccaaaa

SEQ ID NO: 59889 - DNA, 22 bp, synthetic construct
  misc_feature 1..22: note = chemically synthesized
  source 1..22: mol_type = other DNA
cccaaagccttagggccaaaac

SEQ ID NO: 59890 - DNA, 22 bp, synthetic construct
  misc_feature 1..22: note = chemically synthesized
  source 1..22: mol_type = other DNA
agggccaaaacggttttgaacc

SEQ ID NO: 59891 - DNA, 22 bp, synthetic construct
  misc_feature 1..22: note = chemically synthesized
  source 1..22: mol_type = other DNA
gggccaaaacggttttgaacct

SEQ ID NO: 59892 - DNA, 22 bp, synthetic construct
  misc_feature 1..22: note = chemically synthesized
  source 1..22: mol_type = other DNA
tgaacctcagaacttgtttgga

SEQ ID NO: 59893 - DNA, 22 bp, synthetic construct
  misc_feature 1..22: note = chemically synthesized
  source 1..22: mol_type = other DNA
gaacctcagaacttgtttggat

SEQ ID NO: 59894 - DNA, 22 bp, synthetic construct
  misc_feature 1..22: note = chemically synthesized
  source 1..22: mol_type = other DNA
aacctcagaacttgtttggatt

SEQ ID NO: 59895 - DNA, 22 bp, synthetic construct
  misc_feature 1..22: note = chemically synthesized
  source 1..22: mol_type = other DNA
agaacttgtttggattttagaa

SEQ ID NO: 59896 - DNA, 22 bp, synthetic construct
  misc_feature 1..22: note = chemically synthesized
  source 1..22: mol_type = other DNA
gtttggattttagaaaggcagt

SEQ ID NO: 59897 - DNA, 22 bp, synthetic construct
  misc_feature 1..22: note = chemically synthesized
  source 1..22: mol_type = other DNA
tttggattttagaaaggcagta

SEQ ID NO: 59898 - DNA, 22 bp, synthetic construct
  misc_feature 1..22: note = chemically synthesized
  source 1..22: mol_type = other DNA
ggattttagaaaggcagtaatg

SEQ ID NO: 59899 - DNA, 22 bp, synthetic construct
  misc_feature 1..22: note = chemically synthesized
  source 1..22: mol_type = other DNA
gattttagaaaggcagtaatgg

SEQ ID NO: 59900 - DNA, 22 bp, synthetic construct
  misc_feature 1..22: note = chemically synthesized
  source 1..22: mol_type = other DNA
tagaaaggcagtaatgggcaat

SEQ ID NO: 59901 - DNA, 22 bp, synthetic construct
  misc_feature 1..22: note = chemically synthesized
  source 1..22: mol_type = other DNA
agaaaggcagtaatgggcaatc

SEQ ID NO: 59902 - DNA, 22 bp, synthetic construct
  misc_feature 1..22: note = chemically synthesized
  source 1..22: mol_type = other DNA
gaaaggcagtaatgggcaatca

SEQ ID NO: 59903 - DNA, 22 bp, synthetic construct
  misc_feature 1..22: note = chemically synthesized
  source 1..22: mol_type = other DNA
cttggaagaatctggagctgca

SEQ ID NO: 59904 - DNA, 22 bp, synthetic construct
  misc_feature 1..22: note = chemically synthesized
  source 1..22: mol_type = other DNA
ggaagaatctggagctgcatac

SEQ ID NO: 59905 - DNA, 22 bp, synthetic construct
  misc_feature 1..22: note = chemically synthesized
  source 1..22: mol_type = other DNA
gaagaatctggagctgcatact

SEQ ID NO: 59906 - DNA, 22 bp, synthetic construct
  misc_feature 1..22: note = chemically synthesized
  source 1..22: mol_type = other DNA
gagctgcatactgtaatctatg

SEQ ID NO: 59907 - DNA, 22 bp, synthetic construct
  misc_feature 1..22: note = chemically synthesized
  source 1..22: mol_type = other DNA
catactgtaatctatgcagcaa

SEQ ID NO: 59908 - DNA, 22 bp, synthetic construct
  misc_feature 1..22: note = chemically synthesized
  source 1..22: mol_type = other DNA
taatctatgcagcaaaatatat

SEQ ID NO: 59909 - DNA, 22 bp, synthetic construct
  misc_feature 1..22: note = chemically synthesized
  source 1..22: mol_type = other DNA
tgcagcaaaatatatgaatatg

SEQ ID NO: 59910 - DNA, 22 bp, synthetic construct
  misc_feature 1..22: note = chemically synthesized
  source 1..22: mol_type = other DNA
acacaactaaattaaaaataat

SEQ ID NO: 59911 - DNA, 22 bp, synthetic construct
  misc_feature 1..22: note = chemically synthesized
  source 1..22: mol_type = other DNA
aattaaaaataatctcatgtca

SEQ ID NO: 59912 - DNA, 22 bp, synthetic construct
  misc_feature 1..22: note = chemically synthesized
  source 1..22: mol_type = other DNA
aaaataatctcatgtcagttca

SEQ ID NO: 59913 - DNA, 22 bp, synthetic construct
  misc_feature 1..22: note = chemically synthesized
  source 1..22: mol_type = other DNA
atgtcagttcacgtcaggtgct

SEQ ID NO: 59914 - DNA, 22 bp, synthetic construct
  misc_feature 1..22: note = chemically synthesized
  source 1..22: mol_type = other DNA
acgtcaggtgctaccatcaaat

SEQ ID NO: 59915 - DNA, 22 bp, synthetic construct
  misc_feature 1..22: note = chemically synthesized
  source 1..22: mol_type = other DNA
ccatcaaataaatcacaaaaaa

SEQ ID NO: 59916 - DNA, 22 bp, synthetic construct
  misc_feature 1..22: note = chemically synthesized
  source 1..22: mol_type = other DNA
ttggttttcgtaacattttaca

SEQ ID NO: 59917 - DNA, 22 bp, synthetic construct
  misc_feature 1..22: note = chemically synthesized
  source 1..22: mol_type = other DNA
tggttttcgtaacattttacat

SEQ ID NO: 59918 - DNA, 22 bp, synthetic construct
  misc_feature 1..22: note = chemically synthesized
  source 1..22: mol_type = other DNA
ggttttcgtaacattttacatt

SEQ ID NO: 59919 - DNA, 22 bp, synthetic construct
  misc_feature 1..22: note = chemically synthesized
  source 1..22: mol_type = other DNA
gttttcgtaacattttacattt

SEQ ID NO: 59920 - DNA, 22 bp, synthetic construct
  misc_feature 1..22: note = chemically synthesized
  source 1..22: mol_type = other DNA
tcgtaacattttacatttcaga

SEQ ID NO: 59921 - DNA, 22 bp, synthetic construct
  misc_feature 1..22: note = chemically synthesized
  source 1..22: mol_type = other DNA
cgtaacattttacatttcagac

SEQ ID NO: 59922 - DNA, 22 bp, synthetic construct
  misc_feature 1..22: note = chemically synthesized
  source 1..22: mol_type = other DNA
gtaacattttacatttcagacg

SEQ ID NO: 59923 - DNA, 22 bp, synthetic construct
  misc_feature 1..22: note = chemically synthesized
  source 1..22: mol_type = other DNA
tacatttcagacggtggataaa

SEQ ID NO: 59924 - DNA, 22 bp, synthetic construct
  misc_feature 1..22: note = chemically synthesized
  source 1..22: mol_type = other DNA
acatttcagacggtggataaag

SEQ ID NO: 59925 - DNA, 22 bp, synthetic construct
  misc_feature 1..22: note = chemically synthesized
  source 1..22: mol_type = other DNA
catttcagacggtggataaaga

SEQ ID NO: 59926 - DNA, 22 bp, synthetic construct
  misc_feature 1..22: note = chemically synthesized
  source 1..22: mol_type = other DNA
cagacggtggataaagaactgt

SEQ ID NO: 59927 - DNA, 22 bp, synthetic construct
  misc_feature 1..22: note = chemically synthesized
  source 1..22: mol_type = other DNA
agacggtggataaagaactgtg

SEQ ID NO: 59928 - DNA, 22 bp, synthetic construct
  misc_feature 1..22: note = chemically synthesized
  source 1..22: mol_type = other DNA
tggaggccaggcgtggtggctc

SEQ ID NO: 59929 - DNA, 22 bp, synthetic construct
  misc_feature 1..22: note = chemically synthesized
  source 1..22: mol_type = other DNA
acacctgtaattcgagcacttt

SEQ ID NO: 59930 - DNA, 22 bp, synthetic construct
  misc_feature 1..22: note = chemically synthesized
  source 1..22: mol_type = other DNA
taattcgagcactttgggaggc

SEQ ID NO: 59931 - DNA, 22 bp, synthetic construct
  misc_feature 1..22: note = chemically synthesized
  source 1..22: mol_type = other DNA
gagcactttgggaggctgaggc

SEQ ID NO: 59932 - DNA, 22 bp, synthetic construct
  misc_feature 1..22: note = chemically synthesized
  source 1..22: mol_type = other DNA
tgggaggctgaggcgggaggat

SEQ ID NO: 59933 - DNA, 22 bp, synthetic construct
  misc_feature 1..22: note = chemically synthesized
  source 1..22: mol_type = other DNA
gggaggctgaggcgggaggatc

SEQ ID NO: 59934 - DNA, 22 bp, synthetic construct
  misc_feature 1..22: note = chemically synthesized
  source 1..22: mol_type = other DNA
ggaggctgaggcgggaggatca

SEQ ID NO: 59935 - DNA, 22 bp, synthetic construct
  misc_feature 1..22: note = chemically synthesized
  source 1..22: mol_type = other DNA
aggcgggaggatcacctcctcg

SEQ ID NO: 59936 - DNA, 22 bp, synthetic construct
  misc_feature 1..22: note = chemically synthesized
  source 1..22: mol_type = other DNA
ctcggatccactgaggaggtca

SEQ ID NO: 59937 - DNA, 22 bp, synthetic construct
  misc_feature 1..22: note = chemically synthesized
  source 1..22: mol_type = other DNA
ggatccactgaggaggtcagga

SEQ ID NO: 59938 - DNA, 22 bp, synthetic construct
  misc_feature 1..22: note = chemically synthesized
  source 1..22: mol_type = other DNA
aggaggtcaggagtttgcgact

SEQ ID NO: 59939 - DNA, 22 bp, synthetic construct
  misc_feature 1..22: note = chemically synthesized
  source 1..22: mol_type = other DNA
gcgactagcctggccaacgtgg

SEQ ID NO: 59940 - DNA, 22 bp, synthetic construct
  misc_feature 1..22: note = chemically synthesized
  source 1..22: mol_type = other DNA
cgactagcctggccaacgtggt

SEQ ID NO: 59941 - DNA, 22 bp, synthetic construct
  misc_feature 1..22: note = chemically synthesized
  source 1..22: mol_type = other DNA
gcctggccaacgtggtgaaacc

SEQ ID NO: 59942 - DNA, 22 bp, synthetic construct
  misc_feature 1..22: note = chemically synthesized
  source 1..22: mol_type = other DNA
gccaacgtggtgaaaccccttc

SEQ ID NO: 59943 - DNA, 22 bp, synthetic construct
  misc_feature 1..22: note = chemically synthesized
  source 1..22: mol_type = other DNA
ctctactaaaaatacaaaaatt

SEQ ID NO: 59944 - DNA, 22 bp, synthetic construct
  misc_feature 1..22: note = chemically synthesized
  source 1..22: mol_type = other DNA
tctactaaaaatacaaaaatta

SEQ ID NO: 59945 - DNA, 22 bp, synthetic construct
  misc_feature 1..22: note = chemically synthesized
  source 1..22: mol_type = other DNA
tactaaaaatacaaaaattagc

SEQ ID NO: 59946 - DNA, 22 bp, synthetic construct
  misc_feature 1..22: note = chemically synthesized
  source 1..22: mol_type = other DNA
ctaaaaatacaaaaattagccg

SEQ ID NO: 59947 - DNA, 22 bp, synthetic construct
  misc_feature 1..22: note = chemically synthesized
  source 1..22: mol_type = other DNA
aaaatacaaaaattagccgggc

SEQ ID NO: 59948 - DNA, 22 bp, synthetic construct
  misc_feature 1..22: note = chemically synthesized
  source 1..22: mol_type = other DNA
gccgggcgtggtggcaggtacc

SEQ ID NO: 59949 - DNA, 22 bp, synthetic construct
  misc_feature 1..22: note = chemically synthesized
  source 1..22: mol_type = other DNA
taatcccagcttcttgggaggc

SEQ ID NO: 59950 - DNA, 22 bp, synthetic construct
  misc_feature 1..22: note = chemically synthesized
  source 1..22: mol_type = other DNA
cttgggaggctgaggcaggaga

SEQ ID NO: 59951 - DNA, 22 bp, synthetic construct
  misc_feature 1..22: note = chemically synthesized
  source 1..22: mol_type = other DNA
ttgggaggctgaggcaggagaa

SEQ ID NO: 59952 - DNA, 22 bp, synthetic construct
  misc_feature 1..22: note = chemically synthesized
  source 1..22: mol_type = other DNA
gggaggctgaggcaggagaacc

SEQ ID NO: 59953 - DNA, 22 bp, synthetic construct
  misc_feature 1..22: note = chemically synthesized
  source 1..22: mol_type = other DNA
ggaggctgaggcaggagaacca

SEQ ID NO: 59954 - DNA, 22 bp, synthetic construct
  misc_feature 1..22: note = chemically synthesized
  source 1..22: mol_type = other DNA
aggcaggagaaccacttgaacc

SEQ ID NO: 59955 - DNA, 22 bp, synthetic construct
  misc_feature 1..22: note = chemically synthesized
  source 1..22: mol_type = other DNA
gaacccgggagacagatgttgc

SEQ ID NO: 59956 - DNA, 22 bp, synthetic construct
  misc_feature 1..22: note = chemically synthesized
  source 1..22: mol_type = other DNA
aacccgggagacagatgttgca

SEQ ID NO: 59957 - DNA, 22 bp, synthetic construct
  misc_feature 1..22: note = chemically synthesized
  source 1..22: mol_type = other DNA
cagtgagctgagactgcaccat

SEQ ID NO: 59958 - DNA, 22 bp, synthetic construct
  misc_feature 1..22: note = chemically synthesized
  source 1..22: mol_type = other DNA
agactgcaccattgcactccag

SEQ ID NO: 59959 - DNA, 22 bp, synthetic construct
  misc_feature 1..22: note = chemically synthesized
  source 1..22: mol_type = other DNA
caccattgcactccagcctggg

SEQ ID NO: 59960 - DNA, 22 bp, synthetic construct
  misc_feature 1..22: note = chemically synthesized
  source 1..22: mol_type = other DNA
cactccagcctgggcaacaaga

SEQ ID NO: 59961 - DNA, 22 bp, synthetic construct
  misc_feature 1..22: note = chemically synthesized
  source 1..22: mol_type = other DNA
cagcctgggcaacaagagcgaa

SEQ ID NO: 59962 - DNA, 22 bp, synthetic construct
  misc_feature 1..22: note = chemically synthesized
  source 1..22: mol_type = other DNA
ggcaacaagagcgaaactccat

SEQ ID NO: 59963 - DNA, 22 bp, synthetic construct
  misc_feature 1..22: note = chemically synthesized
  source 1..22: mol_type = other DNA
catctcaaaaaaaaaagaaaaa

SEQ ID NO: 59964 - DNA, 22 bp, synthetic construct
  misc_feature 1..22: note = chemically synthesized
  source 1..22: mol_type = other DNA
aaaaaaaaaagaaaaagaactg

SEQ ID NO: 59965 - DNA, 22 bp, synthetic construct
  misc_feature 1..22: note = chemically synthesized
  source 1..22: mol_type = other DNA
tggacatgtgctccttatcttc

SEQ ID NO: 59966 - DNA, 22 bp, synthetic construct
  misc_feature 1..22: note = chemically synthesized
  source 1..22: mol_type = other DNA
cttatcttccacctctggtttt

SEQ ID NO: 59967 - DNA, 22 bp, synthetic construct
  misc_feature 1..22: note = chemically synthesized
  source 1..22: mol_type = other DNA
atcttccacctctggttttccc

SEQ ID NO: 59968 - DNA, 22 bp, synthetic construct
  misc_feature 1..22: note = chemically synthesized
  source 1..22: mol_type = other DNA
tcttccacctctggttttccca

SEQ ID NO: 59969 - DNA, 22 bp, synthetic construct
  misc_feature 1..22: note = chemically synthesized
  source 1..22: mol_type = other DNA
ccacctctggttttcccagctc

SEQ ID NO: 59970 - DNA, 22 bp, synthetic construct
  misc_feature 1..22: note = chemically synthesized
  source 1..22: mol_type = other DNA
cacctctggttttcccagctct

SEQ ID NO: 59971 - DNA, 22 bp, synthetic construct
  misc_feature 1..22: note = chemically synthesized
  source 1..22: mol_type = other DNA
tggttttcccagctctgtatct

SEQ ID NO: 59972 - DNA, 22 bp, synthetic construct
  misc_feature 1..22: note = chemically synthesized
  source 1..22: mol_type = other DNA
gttttcccagctctgtatcttt

SEQ ID NO: 59973 - DNA, 22 bp, synthetic construct
  misc_feature 1..22: note = chemically synthesized
  source 1..22: mol_type = other DNA
tcccagctctgtatctttgttc

SEQ ID NO: 59974 - DNA, 22 bp, synthetic construct
  misc_feature 1..22: note = chemically synthesized
  source 1..22: mol_type = other DNA
cccagctctgtatctttgttca

SEQ ID NO: 59975 - DNA, 22 bp, synthetic construct
  misc_feature 1..22: note = chemically synthesized
  source 1..22: mol_type = other DNA
ccagctctgtatctttgttcat

SEQ ID NO: 59976 - DNA, 22 bp, synthetic construct
  misc_feature 1..22: note = chemically synthesized
  source 1..22: mol_type = other DNA
tgtatctttgttcatggtacct

SEQ ID NO: 59977 - DNA, 22 bp, synthetic construct
  misc_feature 1..22: note = chemically synthesized
  source 1..22: mol_type = other DNA
tatctttgttcatggtacctcc

SEQ ID NO: 59978 - DNA, 22 bp, synthetic construct
  misc_feature 1..22: note = chemically synthesized
  source 1..22: mol_type = other DNA
tgttcatggtacctcctaatcc

SEQ ID NO: 59979 - DNA, 22 bp, synthetic construct
  misc_feature 1..22: note = chemically synthesized
  source 1..22: mol_type = other DNA
gttcatggtacctcctaatcct

SEQ ID NO: 59980 - DNA, 22 bp, synthetic construct
  misc_feature 1..22: note = chemically synthesized
  source 1..22: mol_type = other DNA
ttcatggtacctcctaatccta

SEQ ID NO: 59981 - DNA, 22 bp, synthetic construct
  misc_feature 1..22: note = chemically synthesized
  source 1..22: mol_type = other DNA
atggtacctcctaatcctagaa

SEQ ID NO: 59982 - DNA, 22 bp, synthetic construct
  misc_feature 1..22: note = chemically synthesized
  source 1..22: mol_type = other DNA
ctaatcctagaataaaattctc

SEQ ID NO: 59983 - DNA, 22 bp, synthetic construct
  misc_feature 1..22: note = chemically synthesized
  source 1..22: mol_type = other DNA
atcctagaataaaattctcatg

SEQ ID NO: 59984 - DNA, 22 bp, synthetic construct
  misc_feature 1..22: note = chemically synthesized
  source 1..22: mol_type = other DNA
gaataaaattctcatgacacca

SEQ ID NO: 59985 - DNA, 22 bp, synthetic construct
  misc_feature 1..22: note = chemically synthesized
  source 1..22: mol_type = other DNA
tcatgacaccatcatcgctgaa

SEQ ID NO: 59986 - DNA, 22 bp, synthetic construct
  misc_feature 1..22: note = chemically synthesized
  source 1..22: mol_type = other DNA
atgacaccatcatcgctgaact

SEQ ID NO: 59987 - DNA, 22 bp, synthetic construct
  misc_feature 1..22: note = chemically synthesized
  source 1..22: mol_type = other DNA
aactcctactaatgcttcaaag

SEQ ID NO: 59988 - DNA, 22 bp, synthetic construct
  misc_feature 1..22: note = chemically synthesized
  source 1..22: mol_type = other DNA
ctactaatgcttcaaagaccca

SEQ ID NO: 59989 - DNA, 22 bp, synthetic construct
  misc_feature 1..22: note = chemically synthesized
  source 1..22: mol_type = other DNA
ctaatgcttcaaagacccatct

SEQ ID NO: 59990 - DNA, 22 bp, synthetic construct
  misc_feature 1..22: note = chemically synthesized
  source 1..22: mol_type = other DNA
atgcttcaaagacccatctgaa

SEQ ID NO: 59991 - DNA, 22 bp, synthetic construct
  misc_feature 1..22: note = chemically synthesized
  source 1..22: mol_type = other DNA
caaagacccatctgaaaatgcc

SEQ ID NO: 59992 - DNA, 22 bp, synthetic construct
  misc_feature 1..22: note = chemically synthesized
  source 1..22: mol_type = other DNA
aaagacccatctgaaaatgcct

SEQ ID NO: 59993 - DNA, 22 bp, synthetic construct
  misc_feature 1..22: note = chemically synthesized
  source 1..22: mol_type = other DNA
aaaatgccttccgctaaataaa

SEQ ID NO: 59994 - DNA, 22 bp, synthetic construct
  misc_feature 1..22: note = chemically synthesized
  source 1..22: mol_type = other DNA
ccgctaaataaaaattgaatga

SEQ ID NO: 59995 - DNA, 22 bp, synthetic construct
  misc_feature 1..22: note = chemically synthesized
  source 1..22: mol_type = other DNA
cgctaaataaaaattgaatgaa

SEQ ID NO: 59996 - DNA, 22 bp, synthetic construct
  misc_feature 1..22: note = chemically synthesized
  source 1..22: mol_type = other DNA
aataaaaattgaatgaattggg

SEQ ID NO: 59997 - DNA, 22 bp, synthetic construct
  misc_feature 1..22: note = chemically synthesized
  source 1..22: mol_type = other DNA
aatgaattgggagagtactctg

SEQ ID NO: 59998 - DNA, 22 bp, synthetic construct
  misc_feature 1..22: note = chemically synthesized
  source 1..22: mol_type = other DNA
ggagagtactctgtgcagtgga

SEQ ID NO: 59999 - DNA, 22 bp, synthetic construct
  misc_feature 1..22: note = chemically synthesized
  source 1..22: mol_type = other DNA
tgtgcagtggagtgtcagttct

SEQ ID NO: 60000 - DNA, 22 bp, synthetic construct
  misc_feature 1..22: note = chemically synthesized
  source 1..22: mol_type = other DNA
tgcagtggagtgtcagttctgg

SEQ ID NO: 60001 - DNA, 22 bp, synthetic construct
  misc_feature 1..22: note = chemically synthesized
  source 1..22: mol_type = other DNA
tggaaacccagttctaatgcac

SEQ ID NO: 60002 - DNA, 22 bp, synthetic construct
  misc_feature 1..22: note = chemically synthesized
  source 1..22: mol_type = other DNA
gaaacccagttctaatgcacct

SEQ ID NO: 60003 - DNA, 22 bp, synthetic construct
  misc_feature 1..22: note = chemically synthesized
  source 1..22: mol_type = other DNA
taatgcacctggggtgacctcc

SEQ ID NO: 60004 - DNA, 22 bp, synthetic construct
  misc_feature 1..22: note = chemically synthesized
  source 1..22: mol_type = other DNA
atgcacctggggtgacctcctc

SEQ ID NO: 60005 - DNA, 22 bp, synthetic construct
  misc_feature 1..22: note = chemically synthesized
  source 1..22: mol_type = other DNA
gggtgacctcctctctctgggc

SEQ ID NO: 60006 - DNA, 22 bp, synthetic construct
  misc_feature 1..22: note = chemically synthesized
  source 1..22: mol_type = other DNA
ctctctctgggcctcagtttct

SEQ ID NO: 60007 - DNA, 22 bp, synthetic construct
  misc_feature 1..22: note = chemically synthesized
  source 1..22: mol_type = other DNA
tctctgggcctcagtttctcat

SEQ ID NO: 60008 - DNA, 22 bp, synthetic construct
  misc_feature 1..22: note = chemically synthesized
  source 1..22: mol_type = other DNA
tctgggcctcagtttctcatga

SEQ ID NO: 60009 - DNA, 22 bp, synthetic construct
  misc_feature 1..22: note = chemically synthesized
  source 1..22: mol_type = other DNA
tgggcctcagtttctcatgact

SEQ ID NO: 60010 - DNA, 22 bp, synthetic construct
  misc_feature 1..22: note = chemically synthesized
  source 1..22: mol_type = other DNA
ggcctcagtttctcatgactaa

SEQ ID NO: 60011 - DNA, 22 bp, synthetic construct
  misc_feature 1..22: note = chemically synthesized
  source 1..22: mol_type = other DNA
agtttctcatgactaaaagaaa

SEQ ID NO: 60012 - DNA, 22 bp, synthetic construct
  misc_feature 1..22: note = chemically synthesized
  source 1..22: mol_type = other DNA
ctcatgactaaaagaaaaggat

SEQ ID NO: 60013 - DNA, 22 bp, synthetic construct
  misc_feature 1..22: note = chemically synthesized
  source 1..22: mol_type = other DNA
tcatgactaaaagaaaaggatt

SEQ ID NO: 60014 - DNA, 22 bp, synthetic construct
  misc_feature 1..22: note = chemically synthesized
  source 1..22: mol_type = other DNA
atgactaaaagaaaaggattgg

SEQ ID NO: 60015 - DNA, 22 bp, synthetic construct
  misc_feature 1..22: note = chemically synthesized
  source 1..22: mol_type = other DNA
aaagaaaaggattggtctaaaa

SEQ ID NO: 60016 - DNA, 22 bp, synthetic construct
  misc_feature 1..22: note = chemically synthesized
  source 1..22: mol_type = other DNA
gtctaaaaattattttctgctt

SEQ ID NO: 60017 - DNA, 22 bp, synthetic construct
  misc_feature 1..22: note = chemically synthesized
  source 1..22: mol_type = other DNA
aaaattattttctgcttgccaa

SEQ ID NO: 60018 - DNA, 22 bp, synthetic construct
  misc_feature 1..22: note = chemically synthesized
  source 1..22: mol_type = other DNA
ttttctgcttgccaaaaaatat

SEQ ID NO: 60019 - DNA, 22 bp, synthetic construct
  misc_feature 1..22: note = chemically synthesized
  source 1..22: mol_type = other DNA
tctgcttgccaaaaaatatttt

SEQ ID NO: 60020 - DNA, 22 bp, synthetic construct
  misc_feature 1..22: note = chemically synthesized
  source 1..22: mol_type = other DNA
ctgcttgccaaaaaatattttc

SEQ ID NO: 60021 - DNA, 22 bp, synthetic construct
  misc_feature 1..22: note = chemically synthesized
  source 1..22: mol_type = other DNA
tgcttgccaaaaaatattttca

SEQ ID NO: 60022 - DNA, 22 bp, synthetic construct
  misc_feature 1..22: note = chemically synthesized
  source 1..22: mol_type = other DNA
cttgccaaaaaatattttcatt

SEQ ID NO: 60023 - DNA, 22 bp, synthetic construct
  misc_feature 1..22: note = chemically synthesized
  source 1..22: mol_type = other DNA
gccaaaaaatattttcattcta

SEQ ID NO: 60024 - DNA, 22 bp, synthetic construct
  misc_feature 1..22: note = chemically synthesized
  source 1..22: mol_type = other DNA
ccaaaaaatattttcattctaa

SEQ ID NO: 60025 - DNA, 22 bp, synthetic construct
  misc_feature 1..22: note = chemically synthesized
  source 1..22: mol_type = other DNA
tcattctaaattcgattcccac

SEQ ID NO: 60026 - DNA, 22 bp, synthetic construct
  misc_feature 1..22: note = chemically synthesized
  source 1..22: mol_type = other DNA
cattctaaattcgattcccaca

SEQ ID NO: 60027 - DNA, 22 bp, synthetic construct
  misc_feature 1..22: note = chemically synthesized
  source 1..22: mol_type = other DNA
attctaaattcgattcccacaa

SEQ ID NO: 60028 - DNA, 22 bp, synthetic construct
  misc_feature 1..22: note = chemically synthesized
  source 1..22: mol_type = other DNA
taaattcgattcccacaaaata

SEQ ID NO: 60029 - DNA, 22 bp, synthetic construct
  misc_feature 1..22: note = chemically synthesized
  source 1..22: mol_type = other DNA
aattcgattcccacaaaataac

SEQ ID NO: 60030 - DNA, 22 bp, synthetic construct
  misc_feature 1..22: note = chemically synthesized
  source 1..22: mol_type = other DNA
gattcccacaaaataaccattg

SEQ ID NO: 60031 - DNA, 22 bp, synthetic construct
  misc_feature 1..22: note = chemically synthesized
  source 1..22: mol_type = other DNA
ccacaaaataaccattgaatga

SEQ ID NO: 60032 - DNA, 22 bp, synthetic construct
  misc_feature 1..22: note = chemically synthesized
  source 1..22: mol_type = other DNA
aatgaatgaataaatgaacttg

SEQ ID NO: 60033 - DNA, 22 bp, synthetic construct
  misc_feature 1..22: note = chemically synthesized
  source 1..22: mol_type = other DNA
gaggaggctcctgttccaaact

SEQ ID NO: 60034 - DNA, 22 bp, synthetic construct
  misc_feature 1..22: note = chemically synthesized
  source 1..22: mol_type = other DNA
aggaggctcctgttccaaactt

SEQ ID NO: 60035 - DNA, 22 bp, synthetic construct
  misc_feature 1..22: note = chemically synthesized
  source 1..22: mol_type = other DNA
ctgttccaaacttccaccagag

SEQ ID NO: 60036 - DNA, 22 bp, synthetic construct
  misc_feature 1..22: note = chemically synthesized
  source 1..22: mol_type = other DNA
ttccaaacttccaccagagaag

SEQ ID NO: 60037 - DNA, 22 bp, synthetic construct
  misc_feature 1..22: note = chemically synthesized
  source 1..22: mol_type = other DNA
caaacttccaccagagaagaaa

SEQ ID NO: 60038 - DNA, 22 bp, synthetic construct
  misc_feature 1..22: note = chemically synthesized
  source 1..22: mol_type = other DNA
ccaccagagaagaaacatcctc

SEQ ID NO: 60039 - DNA, 22 bp, synthetic construct
  misc_feature 1..22: note = chemically synthesized
  source 1..22: mol_type = other DNA
caccagagaagaaacatcctca

SEQ ID NO: 60040 - DNA, 22 bp, synthetic construct
  misc_feature 1..22: note = chemically synthesized
  source 1..22: mol_type = other DNA
aagggcttggttcaggtggtca

SEQ ID NO: 60041 - DNA, 22 bp, synthetic construct
  misc_feature 1..22: note = chemically synthesized
  source 1..22: mol_type = other DNA
ggttcaggtggtcatacagcct

SEQ ID NO: 60042 - DNA, 22 bp, synthetic construct
  misc_feature 1..22: note = chemically synthesized
  source 1..22: mol_type = other DNA
gttcaggtggtcatacagcctc

SEQ ID NO: 60043 - DNA, 22 bp, synthetic construct
  misc_feature 1..22: note = chemically synthesized
  source 1..22: mol_type = other DNA
aggtggtcatacagcctctgct

SEQ ID NO: 60044 - DNA, 22 bp, synthetic construct
  misc_feature 1..22: note = chemically synthesized
  source 1..22: mol_type = other DNA
tgcttactcacctctcaggatg

SEQ ID NO: 60045 - DNA, 22 bp, synthetic construct
  misc_feature 1..22: note = chemically synthesized
  source 1..22: mol_type = other DNA
cttactcacctctcaggatggg

SEQ ID NO: 60046 - DNA, 22 bp, synthetic construct
  misc_feature 1..22: note = chemically synthesized
  source 1..22: mol_type = other DNA
actcacctctcaggatggggta

SEQ ID NO: 60047 - DNA, 22 bp, synthetic construct
  misc_feature 1..22: note = chemically synthesized
  source 1..22: mol_type = other DNA
ctcacctctcaggatggggtac

SEQ ID NO: 60048 - DNA, 22 bp, synthetic construct
  misc_feature 1..22: note = chemically synthesized
  source 1..22: mol_type = other DNA
acctctcaggatggggtactca

SEQ ID NO: 60049 - DNA, 22 bp, synthetic construct
  misc_feature 1..22: note = chemically synthesized
  source 1..22: mol_type = other DNA
tcaggatggggtactcactatt

SEQ ID NO: 60050 - DNA, 22 bp, synthetic construct
  misc_feature 1..22: note = chemically synthesized
  source 1..22: mol_type = other DNA
aggatggggtactcactatttc

SEQ ID NO: 60051 - DNA, 22 bp, synthetic construct
  misc_feature 1..22: note = chemically synthesized
  source 1..22: mol_type = other DNA
actatttccagaacagttgttt

SEQ ID NO: 60052 - DNA, 22 bp, synthetic construct
  misc_feature 1..22: note = chemically synthesized
  source 1..22: mol_type = other DNA
tttccagaacagttgttttgga

SEQ ID NO: 60053 - DNA, 22 bp, synthetic construct
  misc_feature 1..22: note = chemically synthesized
  source 1..22: mol_type = other DNA
ccagaacagttgttttggagca

SEQ ID NO: 60054 - DNA, 22 bp, synthetic construct
  misc_feature 1..22: note = chemically synthesized
  source 1..22: mol_type = other DNA
cagaacagttgttttggagcag

SEQ ID NO: 60055 - DNA, 22 bp, synthetic construct
  misc_feature 1..22: note = chemically synthesized
  source 1..22: mol_type = other DNA
ttttggagcagtggtaacttga

SEQ ID NO: 60056 - DNA, 22 bp, synthetic construct
  misc_feature 1..22: note = chemically synthesized
  source 1..22: mol_type = other DNA
tggagcagtggtaacttgaaat

SEQ ID NO: 60057 - DNA, 22 bp, synthetic construct
  misc_feature 1..22: note = chemically synthesized
  source 1..22: mol_type = other DNA
ggagcagtggtaacttgaaatg

SEQ ID NO: 60058 - DNA, 22 bp, synthetic construct
  misc_feature 1..22: note = chemically synthesized
  source 1..22: mol_type = other DNA
gagcagtggtaacttgaaatgc

SEQ ID NO: 60059 - DNA, 22 bp, synthetic construct
  misc_feature 1..22: note = chemically synthesized
  source 1..22: mol_type = other DNA
gaaatgccctttcttatcctgg

SEQ ID NO: 60060 - DNA, 22 bp, synthetic construct
  misc_feature 1..22: note = chemically synthesized
  source 1..22: mol_type = other DNA
aaatgccctttcttatcctggc

SEQ ID NO: 60061 - DNA, 22 bp, synthetic construct
  misc_feature 1..22: note = chemically synthesized
  source 1..22: mol_type = other DNA
tcttatcctggccacaacccca

SEQ ID NO: 60062 - DNA, 22 bp, synthetic construct
  misc_feature 1..22: note = chemically synthesized
  source 1..22: mol_type = other DNA
cttatcctggccacaaccccac

SEQ ID NO: 60063 - DNA, 22 bp, synthetic construct
  misc_feature 1..22: note = chemically synthesized
  source 1..22: mol_type = other DNA
ttatcctggccacaaccccaca

SEQ ID NO: 60064 - DNA, 22 bp, synthetic construct
  misc_feature 1..22: note = chemically synthesized
  source 1..22: mol_type = other DNA
atcctggccacaaccccacaac

SEQ ID NO: 60065 - DNA, 22 bp, synthetic construct
  misc_feature 1..22: note = chemically synthesized
  source 1..22: mol_type = other DNA
tcctggccacaaccccacaaca

SEQ ID NO: 60066 - DNA, 22 bp, synthetic construct
  misc_feature 1..22: note = chemically synthesized
  source 1..22: mol_type = other DNA
gccacaaccccacaacatccct

SEQ ID NO: 60067 - DNA, 22 bp, synthetic construct
  misc_feature 1..22: note = chemically synthesized
  source 1..22: mol_type = other DNA
gagaaagtcaaaggctcaggga

SEQ ID NO: 60068 - DNA, 22 bp, synthetic construct
  misc_feature 1..22: note = chemically synthesized
  source 1..22: mol_type = other DNA
agggaacaaggaagagggctat

SEQ ID NO: 60069 - DNA, 22 bp, synthetic construct
  misc_feature 1..22: note = chemically synthesized
  source 1..22: mol_type = other DNA
tactgagctgagtaaggacttg

SEQ ID NO: 60070 - DNA, 22 bp, synthetic construct
  misc_feature 1..22: note = chemically synthesized
  source 1..22: mol_type = other DNA
agctgagtaaggacttgccatc

SEQ ID NO: 60071 - DNA, 22 bp, synthetic construct
  misc_feature 1..22: note = chemically synthesized
  source 1..22: mol_type = other DNA
agtaaggacttgccatcctgcc

SEQ ID NO: 60072 - DNA, 22 bp, synthetic construct
  misc_feature 1..22: note = chemically synthesized
  source 1..22: mol_type = other DNA
gccatcctgccacccagcacac

SEQ ID NO: 60073 - DNA, 22 bp, synthetic construct
  misc_feature 1..22: note = chemically synthesized
  source 1..22: mol_type = other DNA
ccatcctgccacccagcacact

SEQ ID NO: 60074 - DNA, 22 bp, synthetic construct
  misc_feature 1..22: note = chemically synthesized
  source 1..22: mol_type = other DNA
ccacccagcacactcagacaga

SEQ ID NO: 60075 - DNA, 22 bp, synthetic construct
  misc_feature 1..22: note = chemically synthesized
  source 1..22: mol_type = other DNA
agacagaagcgtgggcaggcag

SEQ ID NO: 60076 - DNA, 22 bp, synthetic construct
  misc_feature 1..22: note = chemically synthesized
  source 1..22: mol_type = other DNA
tgagtggcagaattttcccctc

SEQ ID NO: 60077 - DNA, 22 bp, synthetic construct
  misc_feature 1..22: note = chemically synthesized
  source 1..22: mol_type = other DNA
tcccctctgccccaggagctgt

SEQ ID NO: 60078 - DNA, 22 bp, synthetic construct
  misc_feature 1..22: note = chemically synthesized
  source 1..22: mol_type = other DNA
cccctctgccccaggagctgtg

SEQ ID NO: 60079 - DNA, 22 bp, synthetic construct
  misc_feature 1..22: note = chemically synthesized
  source 1..22: mol_type = other DNA
ccctctgccccaggagctgtgg

SEQ ID NO: 60080 - DNA, 22 bp, synthetic construct
  misc_feature 1..22: note = chemically synthesized
  source 1..22: mol_type = other DNA
tgccccaggagctgtggtttgg

SEQ ID NO: 60081 - DNA, 22 bp, synthetic construct
  misc_feature 1..22: note = chemically synthesized
  source 1..22: mol_type = other DNA
ccccaggagctgtggtttggag

SEQ ID NO: 60082 - DNA, 22 bp, synthetic construct
  misc_feature 1..22: note = chemically synthesized
  source 1..22: mol_type = other DNA
tggtttggagcaaagacaatgt

SEQ ID NO: 60083 - DNA, 22 bp, synthetic construct
  misc_feature 1..22: note = chemically synthesized
  source 1..22: mol_type = other DNA
ggagcaaagacaatgtcaccaa

SEQ ID NO: 60084 - DNA, 22 bp, synthetic construct
  misc_feature 1..22: note = chemically synthesized
  source 1..22: mol_type = other DNA
gagcaaagacaatgtcaccaac

SEQ ID NO: 60085 - DNA, 22 bp, synthetic construct
  misc_feature 1..22: note = chemically synthesized
  source 1..22: mol_type = other DNA
cagacagggacaaaactgcaag

SEQ ID NO: 60086 - DNA, 22 bp, synthetic construct
  misc_feature 1..22: note = chemically synthesized
  source 1..22: mol_type = other DNA
caagtgatccccccggggcttg

SEQ ID NO: 60087 - DNA, 22 bp, synthetic construct
  misc_feature 1..22: note = chemically synthesized
  source 1..22: mol_type = other DNA
gcattgtaagttcactcatggt

SEQ ID NO: 60088 - DNA, 22 bp, synthetic construct
  misc_feature 1..22: note = chemically synthesized
  source 1..22: mol_type = other DNA
cattgtaagttcactcatggtc

SEQ ID NO: 60089 - DNA, 22 bp, synthetic construct
  misc_feature 1..22: note = chemically synthesized
  source 1..22: mol_type = other DNA
taagttcactcatggtcaacag

SEQ ID NO: 60090 - DNA, 22 bp, synthetic construct
  misc_feature 1..22: note = chemically synthesized
  source 1..22: mol_type = other DNA
actcatggtcaacagaactttc

SEQ ID NO: 60091 - DNA, 22 bp, synthetic construct
  misc_feature 1..22: note = chemically synthesized
  source 1..22: mol_type = other DNA
atggtcaacagaactttccctt

SEQ ID NO: 60092 - DNA, 22 bp, synthetic construct
  misc_feature 1..22: note = chemically synthesized
  source 1..22: mol_type = other DNA
tcccttcatctccccatctgct

SEQ ID NO: 60093 - DNA, 22 bp, synthetic construct
  misc_feature 1..22: note = chemically synthesized
  source 1..22: mol_type = other DNA
cccttcatctccccatctgctg

SEQ ID NO: 60094 - DNA, 22 bp, synthetic construct
  misc_feature 1..22: note = chemically synthesized
  source 1..22: mol_type = other DNA
ccttcatctccccatctgctgc

SEQ ID NO: 60095 - DNA, 22 bp, synthetic construct
  misc_feature 1..22: note = chemically synthesized
  source 1..22: mol_type = other DNA
catctccccatctgctgccact

SEQ ID NO: 60096 - DNA, 22 bp, synthetic construct
  misc_feature 1..22: note = chemically synthesized
  source 1..22: mol_type = other DNA
atctccccatctgctgccactg

SEQ ID NO: 60097 - DNA, 22 bp, synthetic construct
  misc_feature 1..22: note = chemically synthesized
  source 1..22: mol_type = other DNA
cccatctgctgccactgagccg

SEQ ID NO: 60098 - DNA, 22 bp, synthetic construct
  misc_feature 1..22: note = chemically synthesized
  source 1..22: mol_type = other DNA
ctgccactgagccgtagggacg

SEQ ID NO: 60099 - DNA, 22 bp, synthetic construct
  misc_feature 1..22: note = chemically synthesized
  source 1..22: mol_type = other DNA
ccactgagccgtagggacgatt

SEQ ID NO: 60100 - DNA, 22 bp, synthetic construct
  misc_feature 1..22: note = chemically synthesized
  source 1..22: mol_type = other DNA
agccgtagggacgattgtcacc

SEQ ID NO: 60101 - DNA, 22 bp, synthetic construct
  misc_feature 1..22: note = chemically synthesized
  source 1..22: mol_type = other DNA
tcacctcccttttaaagattag

SEQ ID NO: 60102 - DNA, 22 bp, synthetic construct
  misc_feature 1..22: note = chemically synthesized
  source 1..22: mol_type = other DNA
ccttttaaagattaggcaatgg

SEQ ID NO: 60103 - DNA, 22 bp, synthetic construct
  misc_feature 1..22: note = chemically synthesized
  source 1..22: mol_type = other DNA
ttaaagattaggcaatggaggc

SEQ ID NO: 60104 - DNA, 22 bp, synthetic construct
  misc_feature 1..22: note = chemically synthesized
  source 1..22: mol_type = other DNA
taaagattaggcaatggaggct

SEQ ID NO: 60105 - DNA, 22 bp, synthetic construct
  misc_feature 1..22: note = chemically synthesized
  source 1..22: mol_type = other DNA
aaagattaggcaatggaggctc

SEQ ID NO: 60106 - DNA, 22 bp, synthetic construct
  misc_feature 1..22: note = chemically synthesized
  source 1..22: mol_type = other DNA
aagattaggcaatggaggctca

SEQ ID NO: 60107 - DNA, 22 bp, synthetic construct
  misc_feature 1..22: note = chemically synthesized
  source 1..22: mol_type = other DNA
ggcaatggaggctcaaggataa

SEQ ID NO: 60108 - DNA, 22 bp, synthetic construct
  misc_feature 1..22: note = chemically synthesized
  source 1..22: mol_type = other DNA
aaggataagtgacttgtcaagc

SEQ ID NO: 60109 - DNA, 22 bp, synthetic construct
  misc_feature 1..22: note = chemically synthesized
  source 1..22: mol_type = other DNA
gtcaagcaccacagctagtgag

SEQ ID NO: 60110 - DNA, 22 bp, synthetic construct
  misc_feature 1..22: note = chemically synthesized
  source 1..22: mol_type = other DNA
tcaagcaccacagctagtgaga

SEQ ID NO: 60111 - DNA, 22 bp, synthetic construct
  misc_feature 1..22: note = chemically synthesized
  source 1..22: mol_type = other DNA
gtgagaggaagccaagattcaa

SEQ ID NO: 60112 - DNA, 22 bp, synthetic construct
  misc_feature 1..22: note = chemically synthesized
  source 1..22: mol_type = other DNA
aaccccacatctgactccaagc

SEQ ID NO: 60113 - DNA, 22 bp, synthetic construct
  misc_feature 1..22: note = chemically synthesized
  source 1..22: mol_type = other DNA
actccaagctgggggacacaga

SEQ ID NO: 60114 - DNA, 22 bp, synthetic construct
  misc_feature 1..22: note = chemically synthesized
  source 1..22: mol_type = other DNA
caagctgggggacacagaacct

SEQ ID NO: 60115 - DNA, 22 bp, synthetic construct
  misc_feature 1..22: note = chemically synthesized
  source 1..22: mol_type = other DNA
ggggacacagaacctcagccaa

SEQ ID NO: 60116 - DNA, 22 bp, synthetic construct
  misc_feature 1..22: note = chemically synthesized
  source 1..22: mol_type = other DNA
agccaagtcctgggctggtaat

SEQ ID NO: 60117 - DNA, 22 bp, synthetic construct
  misc_feature 1..22: note = chemically synthesized
  source 1..22: mol_type = other DNA
ggctggtaatacttagaaaaag

SEQ ID NO: 60118 - DNA, 22 bp, synthetic construct
  misc_feature 1..22: note = chemically synthesized
  source 1..22: mol_type = other DNA
gtaatacttagaaaaagctagt

SEQ ID NO: 60119 - DNA, 22 bp, synthetic construct
  misc_feature 1..22: note = chemically synthesized
  source 1..22: mol_type = other DNA
agaaaaagctagtggtctcgcc

SEQ ID NO: 60120 - DNA, 22 bp, synthetic construct
  misc_feature 1..22: note = chemically synthesized
  source 1..22: mol_type = other DNA
gaaaaagctagtggtctcgccc

SEQ ID NO: 60121 - DNA, 22 bp, synthetic construct
  misc_feature 1..22: note = chemically synthesized
  source 1..22: mol_type = other DNA
gtggtctcgccccgggaagaag

SEQ ID NO: 60122 - DNA, 22 bp, synthetic construct
  misc_feature 1..22: note = chemically synthesized
  source 1..22: mol_type = other DNA
gccccgggaagaagcttcccac

SEQ ID NO: 60123 - DNA, 22 bp, synthetic construct
  misc_feature 1..22: note = chemically synthesized
  source 1..22: mol_type = other DNA
cccacagcctgagggccagaag

SEQ ID NO: 60124 - DNA, 22 bp, synthetic construct
  misc_feature 1..22: note = chemically synthesized
  source 1..22: mol_type = other DNA
ccacagcctgagggccagaagc

SEQ ID NO: 60125 - DNA, 22 bp, synthetic construct
  misc_feature 1..22: note = chemically synthesized
  source 1..22: mol_type = other DNA
agggccagaagctggcagagtt

SEQ ID NO: 60126 - DNA, 22 bp, synthetic construct
  misc_feature 1..22: note = chemically synthesized
  source 1..22: mol_type = other DNA
gcagagttgttgagcaaactcg

SEQ ID NO: 60127 - DNA, 22 bp, synthetic construct
  misc_feature 1..22: note = chemically synthesized
  source 1..22: mol_type = other DNA
ttgagcaaactcgccccgcaca

SEQ ID NO: 60128 - DNA, 22 bp, synthetic construct
  misc_feature 1..22: note = chemically synthesized
  source 1..22: mol_type = other DNA
agcaaactcgccccgcacacgg

SEQ ID NO: 60129 - DNA, 22 bp, synthetic construct
  misc_feature 1..22: note = chemically synthesized
  source 1..22: mol_type = other DNA
gccccgcacacggtcggcagac

SEQ ID NO: 60130 - DNA, 22 bp, synthetic construct
  misc_feature 1..22: note = chemically synthesized
  source 1..22: mol_type = other DNA
aggcgccgggctcagctccggg

SEQ ID NO: 60131 - DNA, 22 bp, synthetic construct
  misc_feature 1..22: note = chemically synthesized
  source 1..22: mol_type = other DNA
agctccggggtcccagtaccag

SEQ ID NO: 60132 - DNA, 22 bp, synthetic construct
  misc_feature 1..22: note = chemically synthesized
  source 1..22: mol_type = other DNA
cggggtcccagtaccaggcgca

SEQ ID NO: 60133 - DNA, 22 bp, synthetic construct
  misc_feature 1..22: note = chemically synthesized
  source 1..22: mol_type = other DNA
cggctccagagcaccaagggcc

SEQ ID NO: 60134 - DNA, 22 bp, synthetic construct
  misc_feature 1..22: note = chemically synthesized
  source 1..22: mol_type = other DNA
cagagcaccaagggcccttccc

SEQ ID NO: 60135 - DNA, 22 bp, synthetic construct
  misc_feature 1..22: note = chemically synthesized
  source 1..22: mol_type = other DNA
ccctgcctgagtcctaaaggac

SEQ ID NO: 60136 - DNA, 22 bp, synthetic construct
  misc_feature 1..22: note = chemically synthesized
  source 1..22: mol_type = other DNA
cctgcctgagtcctaaaggacg

SEQ ID NO: 60137 - DNA, 22 bp, synthetic construct
  misc_feature 1..22: note = chemically synthesized
  source 1..22: mol_type = other DNA
cctgagtcctaaaggacgccaa

SEQ ID NO: 60138 - DNA, 22 bp, synthetic construct
  misc_feature 1..22: note = chemically synthesized
  source 1..22: mol_type = other DNA
agtcctaaaggacgccaatggg

SEQ ID NO: 60139 - DNA, 22 bp, synthetic construct
  misc_feature 1..22: note = chemically synthesized
  source 1..22: mol_type = other DNA
aaggacgccaatgggcctcgag

SEQ ID NO: 60140 - DNA, 22 bp, synthetic construct
  misc_feature 1..22: note = chemically synthesized
  source 1..22: mol_type = other DNA
gagaatacctccgccccttctc

SEQ ID NO: 60141 - DNA, 22 bp, synthetic construct
  misc_feature 1..22: note = chemically synthesized
  source 1..22: mol_type = other DNA
cgccccttctcccctgcccctt

SEQ ID NO: 60142 - DNA, 22 bp, synthetic construct
  misc_feature 1..22: note = chemically synthesized
  source 1..22: mol_type = other DNA
ctcccctgccccttcagctggt

SEQ ID NO: 60143 - DNA, 22 bp, synthetic construct
  misc_feature 1..22: note = chemically synthesized
  source 1..22: mol_type = other DNA
tcccctgccccttcagctggtt

SEQ ID NO: 60144 - DNA, 22 bp, synthetic construct
  misc_feature 1..22: note = chemically synthesized
  source 1..22: mol_type = other DNA
ccctgccccttcagctggttct

SEQ ID NO: 60145 - DNA, 22 bp, synthetic construct
  misc_feature 1..22: note = chemically synthesized
  source 1..22: mol_type = other DNA
ccccttcagctggttcttttct

SEQ ID NO: 60146 - DNA, 22 bp, synthetic construct
  misc_feature 1..22: note = chemically synthesized
  source 1..22: mol_type = other DNA
cagctggttcttttcttcggct

SEQ ID NO: 60147 - DNA, 22 bp, synthetic construct
  misc_feature 1..22: note = chemically synthesized
  source 1..22: mol_type = other DNA
agctggttcttttcttcggctg

SEQ ID NO: 60148 - DNA, 22 bp, synthetic construct
  misc_feature 1..22: note = chemically synthesized
  source 1..22: mol_type = other DNA
gttcttttcttcggctgaaaca

SEQ ID NO: 60149 - DNA, 22 bp, synthetic construct
  misc_feature 1..22: note = chemically synthesized
  source 1..22: mol_type = other DNA
ttttcttcggctgaaacagatg

SEQ ID NO: 60150 - DNA, 22 bp, synthetic construct
  misc_feature 1..22: note = chemically synthesized
  source 1..22: mol_type = other DNA
ttcttcggctgaaacagatgga

SEQ ID NO: 60151 - DNA, 22 bp, synthetic construct
  misc_feature 1..22: note = chemically synthesized
  source 1..22: mol_type = other DNA
tcttcggctgaaacagatggaa

SEQ ID NO: 60152 - DNA, 22 bp, synthetic construct
  misc_feature 1..22: note = chemically synthesized
  source 1..22: mol_type = other DNA
cttcggctgaaacagatggaat

SEQ ID NO: 60153 - DNA, 22 bp, synthetic construct
  misc_feature 1..22: note = chemically synthesized
  source 1..22: mol_type = other DNA
ttcggctgaaacagatggaata

SEQ ID NO: 60154 - DNA, 22 bp, synthetic construct
  misc_feature 1..22: note = chemically synthesized
  source 1..22: mol_type = other DNA
cggctgaaacagatggaatact

SEQ ID NO: 60155 - DNA, 22 bp, synthetic construct
  misc_feature 1..22: note = chemically synthesized
  source 1..22: mol_type = other DNA
ggctgaaacagatggaatacta

SEQ ID NO: 60156 - DNA, 22 bp, synthetic construct
  misc_feature 1..22: note = chemically synthesized
  source 1..22: mol_type = other DNA
aaacagatggaatactagagca

SEQ ID NO: 60157 - DNA, 22 bp, synthetic construct
  misc_feature 1..22: note = chemically synthesized
  source 1..22: mol_type = other DNA
gagcatgagttctgtgtcataa

SEQ ID NO: 60158 - DNA, 22 bp, synthetic construct
  misc_feature 1..22: note = chemically synthesized
  source 1..22: mol_type = other DNA
tgtgtcataaagaaattgcctc

SEQ ID NO: 60159 - DNA, 22 bp, synthetic construct
  misc_feature 1..22: note = chemically synthesized
  source 1..22: mol_type = other DNA
tgtcataaagaaattgcctcgt

SEQ ID NO: 60160 - DNA, 22 bp, synthetic construct
  misc_feature 1..22: note = chemically synthesized
  source 1..22: mol_type = other DNA
cctcgtgctcccagcatctgcc

SEQ ID NO: 60161 - DNA, 22 bp, synthetic construct
  misc_feature 1..22: note = chemically synthesized
  source 1..22: mol_type = other DNA
gtgctcccagcatctgccgtcc

SEQ ID NO: 60162 - DNA, 22 bp, synthetic construct
  misc_feature 1..22: note = chemically synthesized
  source 1..22: mol_type = other DNA
ccagcatctgccgtccttccca

SEQ ID NO: 60163 - DNA, 22 bp, synthetic construct
  misc_feature 1..22: note = chemically synthesized
  source 1..22: mol_type = other DNA
ccgtccttcccaccccgcccct

SEQ ID NO: 60164 - DNA, 22 bp, synthetic construct
  misc_feature 1..22: note = chemically synthesized
  source 1..22: mol_type = other DNA
cccaccccgcccctgtctcggg

SEQ ID NO: 60165 - DNA, 22 bp, synthetic construct
  misc_feature 1..22: note = chemically synthesized
  source 1..22: mol_type = other DNA
ccaccccgcccctgtctcgggt

SEQ ID NO: 60166 - DNA, 22 bp, synthetic construct
  misc_feature 1..22: note = chemically synthesized
  source 1..22: mol_type = other DNA
tctcgggtagggccttctctcc

SEQ ID NO: 60167 - DNA, 22 bp, synthetic construct
  misc_feature 1..22: note = chemically synthesized
  source 1..22: mol_type = other DNA
gggtagggccttctctccaggc

SEQ ID NO: 60168 - DNA, 22 bp, synthetic construct
  misc_feature 1..22: note = chemically synthesized
  source 1..22: mol_type = other DNA
ctctccaggccctccaccctcc

SEQ ID NO: 60169 - DNA, 22 bp, synthetic construct
  misc_feature 1..22: note = chemically synthesized
  source 1..22: mol_type = other DNA
tctccaggccctccaccctccg

SEQ ID NO: 60170 - DNA, 22 bp, synthetic construct
  misc_feature 1..22: note = chemically synthesized
  source 1..22: mol_type = other DNA
tccaggccctccaccctccgct

SEQ ID NO: 60171 - DNA, 22 bp, synthetic construct
  misc_feature 1..22: note = chemically synthesized
  source 1..22: mol_type = other DNA
caggccctccaccctccgctgc

SEQ ID NO: 60172 - DNA, 22 bp, synthetic construct
  misc_feature 1..22: note = chemically synthesized
  source 1..22: mol_type = other DNA
caccctccgctgcccatgtttt

SEQ ID NO: 60173 - DNA, 22 bp, synthetic construct
  misc_feature 1..22: note = chemically synthesized
  source 1..22: mol_type = other DNA
cgctgcccatgttttccaaacc

SEQ ID NO: 60174 - DNA, 22 bp, synthetic construct
  misc_feature 1..22: note = chemically synthesized
  source 1..22: mol_type = other DNA
cccatgttttccaaaccaaatc

SEQ ID NO: 60175 - DNA, 22 bp, synthetic construct
  misc_feature 1..22: note = chemically synthesized
  source 1..22: mol_type = other DNA
tccaaaccaaatcggaacccac

SEQ ID NO: 60176 - DNA, 22 bp, synthetic construct
  misc_feature 1..22: note = chemically synthesized
  source 1..22: mol_type = other DNA
ccaaaccaaatcggaacccact

SEQ ID NO: 60177 - DNA, 22 bp, synthetic construct
  misc_feature 1..22: note = chemically synthesized
  source 1..22: mol_type = other DNA
caaaccaaatcggaacccacta

SEQ ID NO: 60178 - DNA, 22 bp, synthetic construct
  misc_feature 1..22: note = chemically synthesized
  source 1..22: mol_type = other DNA
taatggcaagcccgctttctct

SEQ ID NO: 60179 - DNA, 22 bp, synthetic construct
  misc_feature 1..22: note = chemically synthesized
  source 1..22: mol_type = other DNA
tctctgtgcctggtgcagttcc

SEQ ID NO: 60180 - DNA, 22 bp, synthetic construct
  misc_feature 1..22: note = chemically synthesized
  source 1..22: mol_type = other DNA
ctctgtgcctggtgcagttccc

SEQ ID NO: 60181 - DNA, 22 bp, synthetic construct
  misc_feature 1..22: note = chemically synthesized
  source 1..22: mol_type = other DNA
tctgtgcctggtgcagttccca

SEQ ID NO: 60182 - DNA, 22 bp, synthetic construct
  misc_feature 1..22: note = chemically synthesized
  source 1..22: mol_type = other DNA
tgtgcctggtgcagttcccagt

SEQ ID NO: 60183 - DNA, 22 bp, synthetic construct
  misc_feature 1..22: note = chemically synthesized
  source 1..22: mol_type = other DNA
tgcctggtgcagttcccagtac

SEQ ID NO: 60184 - DNA, 22 bp, synthetic construct
  misc_feature 1..22: note = chemically synthesized
  source 1..22: mol_type = other DNA
gtgcagttcccagtacgttcca

SEQ ID NO: 60185 - DNA, 22 bp, synthetic construct
  misc_feature 1..22: note = chemically synthesized
  source 1..22: mol_type = other DNA
ccagtacgttccaggcattcac

SEQ ID NO: 60186 - DNA, 22 bp, synthetic construct
  misc_feature 1..22: note = chemically synthesized
  source 1..22: mol_type = other DNA
caggcattcactccttcaccca

SEQ ID NO: 60187 - DNA, 22 bp, synthetic construct
  misc_feature 1..22: note = chemically synthesized
  source 1..22: mol_type = other DNA
actccttcacccacctgtgccg

SEQ ID NO: 60188 - DNA, 22 bp, synthetic construct
  misc_feature 1..22: note = chemically synthesized
  source 1..22: mol_type = other DNA
cttcacccacctgtgccgcggc

SEQ ID NO: 60189 - DNA, 22 bp, synthetic construct
  misc_feature 1..22: note = chemically synthesized
  source 1..22: mol_type = other DNA
cacccacctgtgccgcggcgag

SEQ ID NO: 60190 - DNA, 22 bp, synthetic construct
  misc_feature 1..22: note = chemically synthesized
  source 1..22: mol_type = other DNA
acccacctgtgccgcggcgagg

SEQ ID NO: 60191 - DNA, 22 bp, synthetic construct
  misc_feature 1..22: note = chemically synthesized
  source 1..22: mol_type = other DNA
tgccgcggcgaggcagaaactg

SEQ ID NO: 60192 - DNA, 22 bp, synthetic construct
  misc_feature 1..22: note = chemically synthesized
  source 1..22: mol_type = other DNA
ggaaatctgggcaggatatcct

SEQ ID NO: 60193 - DNA, 22 bp, synthetic construct
  misc_feature 1..22: note = chemically synthesized
  source 1..22: mol_type = other DNA
ggcaggatatcctggcagtgct

SEQ ID NO: 60194 - DNA, 22 bp, synthetic construct
  misc_feature 1..22: note = chemically synthesized
  source 1..22: mol_type = other DNA
gcagtgctctgctcgcccttcc

SEQ ID NO: 60195 - DNA, 22 bp, synthetic construct
  misc_feature 1..22: note = chemically synthesized
  source 1..22: mol_type = other DNA
tgctcgcccttcctcggcctcc

SEQ ID NO: 60196 - DNA, 22 bp, synthetic construct
  misc_feature 1..22: note = chemically synthesized
  source 1..22: mol_type = other DNA
ctcgcccttcctcggcctccgg

SEQ ID NO: 60197 - DNA, 22 bp, synthetic construct
  misc_feature 1..22: note = chemically synthesized
  source 1..22: mol_type = other DNA
gcccttcctcggcctccgggtc

SEQ ID NO: 60198 - DNA, 22 bp, synthetic construct
  misc_feature 1..22: note = chemically synthesized
  source 1..22: mol_type = other DNA
cctcggcctccgggtctcccaa

SEQ ID NO: 60199 - DNA, 22 bp, synthetic construct
  misc_feature 1..22: note = chemically synthesized
  source 1..22: mol_type = other DNA
ctcggcctccgggtctcccaac

SEQ ID NO: 60200 - DNA, 22 bp, synthetic construct
  misc_feature 1..22: note = chemically synthesized
  source 1..22: mol_type = other DNA
ggcctccgggtctcccaacccc

SEQ ID NO: 60201 - DNA, 22 bp, synthetic construct
  misc_feature 1..22: note = chemically synthesized
  source 1..22: mol_type = other DNA
cgggtctcccaaccccgcgaac

SEQ ID NO: 60202 - DNA, 22 bp, synthetic construct
  misc_feature 1..22: note = chemically synthesized
  source 1..22: mol_type = other DNA
ccaaccccgcgaaccttcccac

SEQ ID NO: 60203 - DNA, 22 bp, synthetic construct
  misc_feature 1..22: note = chemically synthesized
  source 1..22: mol_type = other DNA
cccactgaatagcgcagccgca

SEQ ID NO: 60204 - DNA, 22 bp, synthetic construct
  misc_feature 1..22: note = chemically synthesized
  source 1..22: mol_type = other DNA
ccactgaatagcgcagccgcac

SEQ ID NO: 60205 - DNA, 22 bp, synthetic construct
  misc_feature 1..22: note = chemically synthesized
  source 1..22: mol_type = other DNA
aatagcgcagccgcacgcccca

SEQ ID NO: 60206 - DNA, 22 bp, synthetic construct
  misc_feature 1..22: note = chemically synthesized
  source 1..22: mol_type = other DNA
tccaccgtgctccccactaccc

SEQ ID NO: 60207 - DNA, 22 bp, synthetic construct
  misc_feature 1..22: note = chemically synthesized
  source 1..22: mol_type = other DNA
caccgtgctccccactacccgt

SEQ ID NO: 60208 - DNA, 22 bp, synthetic construct
  misc_feature 1..22: note = chemically synthesized
  source 1..22: mol_type = other DNA
cccactacccgtcctcccccgc

SEQ ID NO: 60209 - DNA, 22 bp, synthetic construct
  misc_feature 1..22: note = chemically synthesized
  source 1..22: mol_type = other DNA
cccgtcctcccccgccgccttg

SEQ ID NO: 60210 - DNA, 22 bp, synthetic construct
  misc_feature 1..22: note = chemically synthesized
  source 1..22: mol_type = other DNA
ccccgccgccttgcctgcagtc

SEQ ID NO: 60211 - DNA, 22 bp, synthetic construct
  misc_feature 1..22: note = chemically synthesized
  source 1..22: mol_type = other DNA
gcctgcagtccccaagatcgtg

SEQ ID NO: 60212 - DNA, 22 bp, synthetic construct
  misc_feature 1..22: note = chemically synthesized
  source 1..22: mol_type = other DNA
cctgcagtccccaagatcgtgc

SEQ ID NO: 60213 - DNA, 22 bp, synthetic construct
  misc_feature 1..22: note = chemically synthesized
  source 1..22: mol_type = other DNA
cagtccccaagatcgtgccaag

SEQ ID NO: 60214 - DNA, 22 bp, synthetic construct
  misc_feature 1..22: note = chemically synthesized
  source 1..22: mol_type = other DNA
ggcgacctgcactccacttcct

SEQ ID NO: 60215 - DNA, 22 bp, synthetic construct
  misc_feature 1..22: note = chemically synthesized
  source 1..22: mol_type = other DNA
cactccacttcctctcttacat

SEQ ID NO: 60216 - DNA, 22 bp, synthetic construct
  misc_feature 1..22: note = chemically synthesized
  source 1..22: mol_type = other DNA
cacttcctctcttacatggggg

SEQ ID NO: 60217 - DNA, 22 bp, synthetic construct
  misc_feature 1..22: note = chemically synthesized
  source 1..22: mol_type = other DNA
cctctcttacatggggggaaac

SEQ ID NO: 60218 - DNA, 22 bp, synthetic construct
  misc_feature 1..22: note = chemically synthesized
  source 1..22: mol_type = other DNA
ctctcttacatggggggaaact

SEQ ID NO: 60219 - DNA, 22 bp, synthetic construct
  misc_feature 1..22: note = chemically synthesized
  source 1..22: mol_type = other DNA
tcttacatggggggaaactgag

SEQ ID NO: 60220 - DNA, 22 bp, synthetic construct
  misc_feature 1..22: note = chemically synthesized
  source 1..22: mol_type = other DNA
ttacatggggggaaactgaggc

SEQ ID NO: 60221 - DNA, 22 bp, synthetic construct
  misc_feature 1..22: note = chemically synthesized
  source 1..22: mol_type = other DNA
acatggggggaaactgaggccc

SEQ ID NO: 60222 - DNA, 22 bp, synthetic construct
  misc_feature 1..22: note = chemically synthesized
  source 1..22: mol_type = other DNA
catggggggaaactgaggcccg

SEQ ID NO: 60223 - DNA, 22 bp, synthetic construct
  misc_feature 1..22: note = chemically synthesized
  source 1..22: mol_type = other DNA
aggcccgagaggaaacagcacc

SEQ ID NO: 60224 - DNA, 22 bp, synthetic construct
  misc_feature 1..22: note = chemically synthesized
  source 1..22: mol_type = other DNA
cgggttcgccccggcctcccat

SEQ ID NO: 60225 - DNA, 22 bp, synthetic construct
  misc_feature 1..22: note = chemically synthesized
  source 1..22: mol_type = other DNA
gccccggcctcccatccctaca

SEQ ID NO: 60226 - DNA, 22 bp, synthetic construct
  misc_feature 1..22: note = chemically synthesized
  source 1..22: mol_type = other DNA
ccatccctacacccgcaccttg

SEQ ID NO: 60227 - DNA, 22 bp, synthetic construct
  misc_feature 1..22: note = chemically synthesized
  source 1..22: mol_type = other DNA
cacccgcaccttggcgcagcgg

SEQ ID NO: 60228 - DNA, 22 bp, synthetic construct
  misc_feature 1..22: note = chemically synthesized
  source 1..22: mol_type = other DNA
ggcgcagcggtggaaggtggct

SEQ ID NO: 60229 - DNA, 22 bp, synthetic construct
  misc_feature 1..22: note = chemically synthesized
  source 1..22: mol_type = other DNA
gcgcagcggtggaaggtggctg

SEQ ID NO: 60230 - DNA, 22 bp, synthetic construct
  misc_feature 1..22: note = chemically synthesized
  source 1..22: mol_type = other DNA
tggttccgtgctcgggtgcttc

SEQ ID NO: 60231 - DNA, 22 bp, synthetic construct
  misc_feature 1..22: note = chemically synthesized
  source 1..22: mol_type = other DNA
cgtgctcgggtgcttcggccag

SEQ ID NO: 60232 - DNA, 22 bp, synthetic construct
  misc_feature 1..22: note = chemically synthesized
  source 1..22: mol_type = other DNA
gggtgcttcggccaggccgtcc

SEQ ID NO: 60233 - DNA, 22 bp, synthetic construct
  misc_feature 1..22: note = chemically synthesized
  source 1..22: mol_type = other DNA
cggccaggccgtcctcctcgga

SEQ ID NO: 60234 - DNA, 22 bp, synthetic construct
  misc_feature 1..22: note = chemically synthesized
  source 1..22: mol_type = other DNA
ggccaggccgtcctcctcggaa

SEQ ID NO: 60235 - DNA, 22 bp, synthetic construct
  misc_feature 1..22: note = chemically synthesized
  source 1..22: mol_type = other DNA
ctcggaacgcaaggctagcacc

SEQ ID NO: 60236 - DNA, 22 bp, synthetic construct
  misc_feature 1..22: note = chemically synthesized
  source 1..22: mol_type = other DNA
ggaacgcaaggctagcaccagc

SEQ ID NO: 60237 - DNA, 22 bp, synthetic construct
  misc_feature 1..22: note = chemically synthesized
  source 1..22: mol_type = other DNA
gcaccagctcctcgtagtcgcc

SEQ ID NO: 60238 - DNA, 22 bp, synthetic construct
  misc_feature 1..22: note = chemically synthesized
  source 1..22: mol_type = other DNA
ctcgtagtcgccgtcctcgtcc

SEQ ID NO: 60239 - DNA, 22 bp, synthetic construct
  misc_feature 1..22: note = chemically synthesized
  source 1..22: mol_type = other DNA
gtagtcgccgtcctcgtcctcc

SEQ ID NO: 60240 - DNA, 22 bp, synthetic construct
  misc_feature 1..22: note = chemically synthesized
  source 1..22: mol_type = other DNA
gtcctcctgcgcacgggcgccc

SEQ ID NO: 60241 - DNA, 22 bp, synthetic construct
  misc_feature 1..22: note = chemically synthesized
  source 1..22: mol_type = other DNA
ctgcgcacgggcgcccgcggga

SEQ ID NO: 60242 - DNA, 22 bp, synthetic construct
  misc_feature 1..22: note = chemically synthesized
  source 1..22: mol_type = other DNA
cgcacgggcgcccgcgggaccc

SEQ ID NO: 60243 - DNA, 22 bp, synthetic construct
  misc_feature 1..22: note = chemically synthesized
  source 1..22: mol_type = other DNA
gagctgacggtgcccatgaggg

SEQ ID NO: 60244 - DNA, 22 bp, synthetic construct
  misc_feature 1..22: note = chemically synthesized
  source 1..22: mol_type = other DNA
acggtgcccatgagggccaggg

SEQ ID NO: 60245 - DNA, 22 bp, synthetic construct
  misc_feature 1..22: note = chemically synthesized
  source 1..22: mol_type = other DNA
ctgtcctggcgaggagacctag

SEQ ID NO: 60246 - DNA, 22 bp, synthetic construct
  misc_feature 1..22: note = chemically synthesized
  source 1..22: mol_type = other DNA
tcctggcgaggagacctagagg

SEQ ID NO: 60247 - DNA, 22 bp, synthetic construct
  misc_feature 1..22: note = chemically synthesized
  source 1..22: mol_type = other DNA
gcgaggagacctagaggccgtg

SEQ ID NO: 60248 - DNA, 22 bp, synthetic construct
  misc_feature 1..22: note = chemically synthesized
  source 1..22: mol_type = other DNA
gaggccgtgcgcggtccacgcc

SEQ ID NO: 60249 - DNA, 22 bp, synthetic construct
  misc_feature 1..22: note = chemically synthesized
  source 1..22: mol_type = other DNA
gagccttgcggtggggaggact

SEQ ID NO: 60250 - DNA, 22 bp, synthetic construct
  misc_feature 1..22: note = chemically synthesized
  source 1..22: mol_type = other DNA
agccttgcggtggggaggactg

SEQ ID NO: 60251 - DNA, 22 bp, synthetic construct
  misc_feature 1..22: note = chemically synthesized
  source 1..22: mol_type = other DNA
gcggtggggaggactgtgcagg

SEQ ID NO: 60252 - DNA, 22 bp, synthetic construct
  misc_feature 1..22: note = chemically synthesized
  source 1..22: mol_type = other DNA
cggtggggaggactgtgcagga

SEQ ID NO: 60253 - DNA, 22 bp, synthetic construct
  misc_feature 1..22: note = chemically synthesized
  source 1..22: mol_type = other DNA
tgcaggagctgaagttcaggag

SEQ ID NO: 60254 - DNA, 22 bp, synthetic construct
  misc_feature 1..22: note = chemically synthesized
  source 1..22: mol_type = other DNA
aagttcaggagcagggcgcgtg

SEQ ID NO: 60255 - DNA, 22 bp, synthetic construct
  misc_feature 1..22: note = chemically synthesized
  source 1..22: mol_type = other DNA
aggagcagggcgcgtgaagggg

SEQ ID NO: 60256 - DNA, 22 bp, synthetic construct
  misc_feature 1..22: note = chemically synthesized
  source 1..22: mol_type = other DNA
gctgggagctgggagccgctgc

SEQ ID NO: 60257 - DNA, 22 bp, synthetic construct
  misc_feature 1..22: note = chemically synthesized
  source 1..22: mol_type = other DNA
ggagctgggagccgctgctgca

SEQ ID NO: 60258 - DNA, 22 bp, synthetic construct
  misc_feature 1..22: note = chemically synthesized
  source 1..22: mol_type = other DNA
ggagccgctgctgcaacgacgc

SEQ ID NO: 60259 - DNA, 22 bp, synthetic construct
  misc_feature 1..22: note = chemically synthesized
  source 1..22: mol_type = other DNA
ctgcaacgacgcgtcccggccc

SEQ ID NO: 60260 - DNA, 22 bp, synthetic construct
  misc_feature 1..22: note = chemically synthesized
  source 1..22: mol_type = other DNA
caacgacgcgtcccggcccgcc

SEQ ID NO: 60261 - DNA, 22 bp, synthetic construct
  misc_feature 1..22: note = chemically synthesized
  source 1..22: mol_type = other DNA
actgcctggctcactcctccag

SEQ ID NO: 60262 - DNA, 22 bp, synthetic construct
  misc_feature 1..22: note = chemically synthesized
  source 1..22: mol_type = other DNA
cctggctcactcctccaggctc

SEQ ID NO: 60263 - DNA, 22 bp, synthetic construct
  misc_feature 1..22: note = chemically synthesized
  source 1..22: mol_type = other DNA
gctcactcctccaggctcagac

SEQ ID NO: 60264 - DNA, 22 bp, synthetic construct
  misc_feature 1..22: note = chemically synthesized
  source 1..22: mol_type = other DNA
actcctccaggctcagaccctg

SEQ ID NO: 60265 - DNA, 22 bp, synthetic construct
  misc_feature 1..22: note = chemically synthesized
  source 1..22: mol_type = other DNA
ctccaggctcagaccctgaact

SEQ ID NO: 60266 - DNA, 22 bp, synthetic construct
  misc_feature 1..22: note = chemically synthesized
  source 1..22: mol_type = other DNA
caggctcagaccctgaactgaa

SEQ ID NO: 60267 - DNA, 22 bp, synthetic construct
  misc_feature 1..22: note = chemically synthesized
  source 1..22: mol_type = other DNA
agaccctgaactgaacggcggc

SEQ ID NO: 60268 - DNA, 22 bp, synthetic construct
  misc_feature 1..22: note = chemically synthesized
  source 1..22: mol_type = other DNA
aactgaacggcggcgcccgcct

SEQ ID NO: 60269 - DNA, 22 bp, synthetic construct
  misc_feature 1..22: note = chemically synthesized
  source 1..22: mol_type = other DNA
aacggcggcgcccgcctgcaac

SEQ ID NO: 60270 - DNA, 22 bp, synthetic construct
  misc_feature 1..22: note = chemically synthesized
  source 1..22: mol_type = other DNA
caaccatgagcgcctcgacgtc

SEQ ID NO: 60271 - DNA, 22 bp, synthetic construct
  misc_feature 1..22: note = chemically synthesized
  source 1..22: mol_type = other DNA
gacgtcgctgcggaaaccttct

SEQ ID NO: 60272 - DNA, 22 bp, synthetic construct
  misc_feature 1..22: note = chemically synthesized
  source 1..22: mol_type = other DNA
cggaaaccttctagggtgtggg

SEQ ID NO: 60273 - DNA, 22 bp, synthetic construct
  misc_feature 1..22: note = chemically synthesized
  source 1..22: mol_type = other DNA
ctagggtgtgggtgcttgacgc

SEQ ID NO: 60274 - DNA, 22 bp, synthetic construct
  misc_feature 1..22: note = chemically synthesized
  source 1..22: mol_type = other DNA
tagggtgtgggtgcttgacgcc

SEQ ID NO: 60275 - DNA, 22 bp, synthetic construct
  misc_feature 1..22: note = chemically synthesized
  source 1..22: mol_type = other DNA
gggtgtgggtgcttgacgcctg

SEQ ID NO: 60276 - DNA, 22 bp, synthetic construct
  misc_feature 1..22: note = chemically synthesized
  source 1..22: mol_type = other DNA
gacgcctggggcgcgcagatca

SEQ ID NO: 60277 - DNA, 22 bp, synthetic construct
  misc_feature 1..22: note = chemically synthesized
  source 1..22: mol_type = other DNA
acgcctggggcgcgcagatcac

SEQ ID NO: 60278 - DNA, 22 bp, synthetic construct
  misc_feature 1..22: note = chemically synthesized
  source 1..22: mol_type = other DNA
gggcgcgcagatcacgccacca

SEQ ID NO: 60279 - DNA, 22 bp, synthetic construct
  misc_feature 1..22: note = chemically synthesized
  source 1..22: mol_type = other DNA
tctgattaaacattaacggaac

SEQ ID NO: 60280 - DNA, 22 bp, synthetic construct
  misc_feature 1..22: note = chemically synthesized
  source 1..22: mol_type = other DNA
attaaacattaacggaaccccc

SEQ ID NO: 60281 - DNA, 22 bp, synthetic construct
  misc_feature 1..22: note = chemically synthesized
  source 1..22: mol_type = other DNA
aacattaacggaacccccggac

SEQ ID NO: 60282 - DNA, 22 bp, synthetic construct
  misc_feature 1..22: note = chemically synthesized
  source 1..22: mol_type = other DNA
acggaacccccggactggagga

SEQ ID NO: 60283 - DNA, 22 bp, synthetic construct
  misc_feature 1..22: note = chemically synthesized
  source 1..22: mol_type = other DNA
gaggatcaggtttcggcctcgc

SEQ ID NO: 60284 - DNA, 22 bp, synthetic construct
  misc_feature 1..22: note = chemically synthesized
  source 1..22: mol_type = other DNA
cggcctcgccctccccaaacag

SEQ ID NO: 60285 - DNA, 22 bp, synthetic construct
  misc_feature 1..22: note = chemically synthesized
  source 1..22: mol_type = other DNA
ggcctcgccctccccaaacagc

SEQ ID NO: 60286 - DNA, 22 bp, synthetic construct
  misc_feature 1..22: note = chemically synthesized
  source 1..22: mol_type = other DNA
gccctccccaaacagcgtcaga

SEQ ID NO: 60287 - DNA, 22 bp, synthetic construct
  misc_feature 1..22: note = chemically synthesized
  source 1..22: mol_type = other DNA
cccaaacagcgtcagattacgc

SEQ ID NO: 60288 - DNA, 22 bp, synthetic construct
  misc_feature 1..22: note = chemically synthesized
  source 1..22: mol_type = other DNA
cgcgcagagggaagaaaaaact

SEQ ID NO: 60289 - DNA, 22 bp, synthetic construct
  misc_feature 1..22: note = chemically synthesized
  source 1..22: mol_type = other DNA
ccaaatcctaactgggctggaa

SEQ ID NO: 60290 - DNA, 22 bp, synthetic construct
  misc_feature 1..22: note = chemically synthesized
  source 1..22: mol_type = other DNA
actgggctggaaggcaggccgg

SEQ ID NO: 60291 - DNA, 22 bp, synthetic construct
  misc_feature 1..22: note = chemically synthesized
  source 1..22: mol_type = other DNA
ggctggaaggcaggccggcgcc

SEQ ID NO: 60292 - DNA, 22 bp, synthetic construct
  misc_feature 1..22: note = chemically synthesized
  source 1..22: mol_type = other DNA
gaaggcaggccggcgccctagg

SEQ ID NO: 60293 - DNA, 22 bp, synthetic construct
  misc_feature 1..22: note = chemically synthesized
  source 1..22: mol_type = other DNA
ggggctcctcctctcccgcctc

SEQ ID NO: 60294 - DNA, 22 bp, synthetic construct
  misc_feature 1..22: note = chemically synthesized
  source 1..22: mol_type = other DNA
ctcctctcccgcctctcaccct

SEQ ID NO: 60295 - DNA, 22 bp, synthetic construct
  misc_feature 1..22: note = chemically synthesized
  source 1..22: mol_type = other DNA
ctctcccgcctctcaccctgcg

SEQ ID NO: 60296 - DNA, 22 bp, synthetic construct
  misc_feature 1..22: note = chemically synthesized
  source 1..22: mol_type = other DNA
tcccgcctctcaccctgcgtgg

SEQ ID NO: 60297 - DNA, 22 bp, synthetic construct
  misc_feature 1..22: note = chemically synthesized
  source 1..22: mol_type = other DNA
ccgcctctcaccctgcgtggga

SEQ ID NO: 60298 - DNA, 22 bp, synthetic construct
  misc_feature 1..22: note = chemically synthesized
  source 1..22: mol_type = other DNA
tcaccctgcgtgggatgccaga

SEQ ID NO: 60299 - DNA, 22 bp, synthetic construct
  misc_feature 1..22: note = chemically synthesized
  source 1..22: mol_type = other DNA
accctgcgtgggatgccagact

SEQ ID NO: 60300 - DNA, 22 bp, synthetic construct
  misc_feature 1..22: note = chemically synthesized
  source 1..22: mol_type = other DNA
cgtgggatgccagactccaagt

SEQ ID NO: 60301 - DNA, 22 bp, synthetic construct
  misc_feature 1..22: note = chemically synthesized
  source 1..22: mol_type = other DNA
caagttctgccgggcccacctt

SEQ ID NO: 60302 - DNA, 22 bp, synthetic construct
  misc_feature 1..22: note = chemically synthesized
  source 1..22: mol_type = other DNA
tgccgggcccaccttttcagtg

SEQ ID NO: 60303 - DNA, 22 bp, synthetic construct
  misc_feature 1..22: note = chemically synthesized
  source 1..22: mol_type = other DNA
ccgggcccaccttttcagtgtt

SEQ ID NO: 60304 - DNA, 22 bp, synthetic construct
  misc_feature 1..22: note = chemically synthesized
  source 1..22: mol_type = other DNA
ttcagtgtttcctgggtccacc

SEQ ID NO: 60305 - DNA, 22 bp, synthetic construct
  misc_feature 1..22: note = chemically synthesized
  source 1..22: mol_type = other DNA
tcagtgtttcctgggtccacct

SEQ ID NO: 60306 - DNA, 22 bp, synthetic construct
  misc_feature 1..22: note = chemically synthesized
  source 1..22: mol_type = other DNA
cagtgtttcctgggtccacctt

SEQ ID NO: 60307 - DNA, 22 bp, synthetic construct
  misc_feature 1..22: note = chemically synthesized
  source 1..22: mol_type = other DNA
agtgtttcctgggtccaccttg

SEQ ID NO: 60308 - DNA, 22 bp, synthetic construct
  misc_feature 1..22: note = chemically synthesized
  source 1..22: mol_type = other DNA
cctgggtccaccttgtctcctg

SEQ ID NO: 60309 - DNA, 22 bp, synthetic construct
  misc_feature 1..22: note = chemically synthesized
  source 1..22: mol_type = other DNA
ctgggtccaccttgtctcctgc

SEQ ID NO: 60310 - DNA, 22 bp, synthetic construct
  misc_feature 1..22: note = chemically synthesized
  source 1..22: mol_type = other DNA
ggtccaccttgtctcctgctga

SEQ ID NO: 60311 - DNA, 22 bp, synthetic construct
  misc_feature 1..22: note = chemically synthesized
  source 1..22: mol_type = other DNA
gtctcctgctgaccagtgagac

SEQ ID NO: 60312 - DNA, 22 bp, synthetic construct
  misc_feature 1..22: note = chemically synthesized
  source 1..22: mol_type = other DNA
tctcctgctgaccagtgagact

SEQ ID NO: 60313 - DNA, 22 bp, synthetic construct
  misc_feature 1..22: note = chemically synthesized
  source 1..22: mol_type = other DNA
ctgctgaccagtgagacttctg

SEQ ID NO: 60314 - DNA, 22 bp, synthetic construct
  misc_feature 1..22: note = chemically synthesized
  source 1..22: mol_type = other DNA
ctgaccagtgagacttctgaat

SEQ ID NO: 60315 - DNA, 22 bp, synthetic construct
  misc_feature 1..22: note = chemically synthesized
  source 1..22: mol_type = other DNA
accagtgagacttctgaatcaa

SEQ ID NO: 60316 - DNA, 22 bp, synthetic construct
  misc_feature 1..22: note = chemically synthesized
  source 1..22: mol_type = other DNA
ctgaatcaatcctactgtggac

SEQ ID NO: 60317 - DNA, 22 bp, synthetic construct
  misc_feature 1..22: note = chemically synthesized
  source 1..22: mol_type = other DNA
tgaatcaatcctactgtggact

SEQ ID NO: 60318 - DNA, 22 bp, synthetic construct
  misc_feature 1..22: note = chemically synthesized
  source 1..22: mol_type = other DNA
aatcaatcctactgtggactcc

SEQ ID NO: 60319 - DNA, 22 bp, synthetic construct
  misc_feature 1..22: note = chemically synthesized
  source 1..22: mol_type = other DNA
ctgtggactcctcgctgcccac

SEQ ID NO: 60320 - DNA, 22 bp, synthetic construct
  misc_feature 1..22: note = chemically synthesized
  source 1..22: mol_type = other DNA
tggactcctcgctgcccaccga

SEQ ID NO: 60321 - DNA, 22 bp, synthetic construct
  misc_feature 1..22: note = chemically synthesized
  source 1..22: mol_type = other DNA
ctcgctgcccaccgaattcttt

SEQ ID NO: 60322 - DNA, 22 bp, synthetic construct
  misc_feature 1..22: note = chemically synthesized
  source 1..22: mol_type = other DNA
gctgcccaccgaattctttcca

SEQ ID NO: 60323 - DNA, 22 bp, synthetic construct
  misc_feature 1..22: note = chemically synthesized
  source 1..22: mol_type = other DNA
cccaccgaattctttccactgg

SEQ ID NO: 60324 - DNA, 22 bp, synthetic construct
  misc_feature 1..22: note = chemically synthesized
  source 1..22: mol_type = other DNA
tttccactggccttaacctggc

SEQ ID NO: 60325 - DNA, 22 bp, synthetic construct
  misc_feature 1..22: note = chemically synthesized
  source 1..22: mol_type = other DNA
tccactggccttaacctggcag

SEQ ID NO: 60326 - DNA, 22 bp, synthetic construct
  misc_feature 1..22: note = chemically synthesized
  source 1..22: mol_type = other DNA
ccactggccttaacctggcagc

SEQ ID NO: 60327 - DNA, 22 bp, synthetic construct
  misc_feature 1..22: note = chemically synthesized
  source 1..22: mol_type = other DNA
cactggccttaacctggcagcc

SEQ ID NO: 60328 - DNA, 22 bp, synthetic construct
  misc_feature 1..22: note = chemically synthesized
  source 1..22: mol_type = other DNA
gccttaacctggcagccttcta

SEQ ID NO: 60329 - DNA, 22 bp, synthetic construct
  misc_feature 1..22: note = chemically synthesized
  source 1..22: mol_type = other DNA
aacctggcagccttctaaactt

SEQ ID NO: 60330 - DNA, 22 bp, synthetic construct
  misc_feature 1..22: note = chemically synthesized
  source 1..22: mol_type = other DNA
acctggcagccttctaaactta

SEQ ID NO: 60331 - DNA, 22 bp, synthetic construct
  misc_feature 1..22: note = chemically synthesized
  source 1..22: mol_type = other DNA
gcagccttctaaacttagcctg

SEQ ID NO: 60332 - DNA, 22 bp, synthetic construct
  misc_feature 1..22: note = chemically synthesized
  source 1..22: mol_type = other DNA
ctaaacttagcctggaccccct

SEQ ID NO: 60333 - DNA, 22 bp, synthetic construct
  misc_feature 1..22: note = chemically synthesized
  source 1..22: mol_type = other DNA
taaacttagcctggaccccctc

SEQ ID NO: 60334 - DNA, 22 bp, synthetic construct
  misc_feature 1..22: note = chemically synthesized
  source 1..22: mol_type = other DNA
aacttagcctggaccccctccg

SEQ ID NO: 60335 - DNA, 22 bp, synthetic construct
  misc_feature 1..22: note = chemically synthesized
  source 1..22: mol_type = other DNA
agcctggaccccctccggcctc

SEQ ID NO: 60336 - DNA, 22 bp, synthetic construct
  misc_feature 1..22: note = chemically synthesized
  source 1..22: mol_type = other DNA
gcctggaccccctccggcctct

SEQ ID NO: 60337 - DNA, 22 bp, synthetic construct
  misc_feature 1..22: note = chemically synthesized
  source 1..22: mol_type = other DNA
gaccccctccggcctctgccct

SEQ ID NO: 60338 - DNA, 22 bp, synthetic construct
  misc_feature 1..22: note = chemically synthesized
  source 1..22: mol_type = other DNA
cggcctctgccctttatgcacc

SEQ ID NO: 60339 - DNA, 22 bp, synthetic construct
  misc_feature 1..22: note = chemically synthesized
  source 1..22: mol_type = other DNA
tgccctttatgcaccctgcaca

SEQ ID NO: 60340 - DNA, 22 bp, synthetic construct
  misc_feature 1..22: note = chemically synthesized
  source 1..22: mol_type = other DNA
ccctttatgcaccctgcacact

SEQ ID NO: 60341 - DNA, 22 bp, synthetic construct
  misc_feature 1..22: note = chemically synthesized
  source 1..22: mol_type = other DNA
tatgcaccctgcacactgacct

SEQ ID NO: 60342 - DNA, 22 bp, synthetic construct
  misc_feature 1..22: note = chemically synthesized
  source 1..22: mol_type = other DNA
atgcaccctgcacactgacctt

SEQ ID NO: 60343 - DNA, 22 bp, synthetic construct
  misc_feature 1..22: note = chemically synthesized
  source 1..22: mol_type = other DNA
tgcaccctgcacactgacctta

SEQ ID NO: 60344 - DNA, 22 bp, synthetic construct
  misc_feature 1..22: note = chemically synthesized
  source 1..22: mol_type = other DNA
cacactgaccttaccaactagc

SEQ ID NO: 60345 - DNA, 22 bp, synthetic construct
  misc_feature 1..22: note = chemically synthesized
  source 1..22: mol_type = other DNA
accttaccaactagctgctcct

SEQ ID NO: 60346 - DNA, 22 bp, synthetic construct
  misc_feature 1..22: note = chemically synthesized
  source 1..22: mol_type = other DNA
accaactagctgctccttgaag

SEQ ID NO: 60347 - DNA, 22 bp, synthetic construct
  misc_feature 1..22: note = chemically synthesized
  source 1..22: mol_type = other DNA
ccaactagctgctccttgaaga

SEQ ID NO: 60348 - DNA, 22 bp, synthetic construct
  misc_feature 1..22: note = chemically synthesized
  source 1..22: mol_type = other DNA
gctgctccttgaagagattgct

SEQ ID NO: 60349 - DNA, 22 bp, synthetic construct
  misc_feature 1..22: note = chemically synthesized
  source 1..22: mol_type = other DNA
ctccttgaagagattgcttgct

SEQ ID NO: 60350 - DNA, 22 bp, synthetic construct
  misc_feature 1..22: note = chemically synthesized
  source 1..22: mol_type = other DNA
cttgaagagattgcttgctttt

SEQ ID NO: 60351 - DNA, 22 bp, synthetic construct
  misc_feature 1..22: note = chemically synthesized
  source 1..22: mol_type = other DNA
gaagagattgcttgcttttgat

SEQ ID NO: 60352 - DNA, 22 bp, synthetic construct
  misc_feature 1..22: note = chemically synthesized
  source 1..22: mol_type = other DNA
aagagattgcttgcttttgatg

SEQ ID NO: 60353 - DNA, 22 bp, synthetic construct
  misc_feature 1..22: note = chemically synthesized
  source 1..22: mol_type = other DNA
cttgcttttgatgtccagccta

SEQ ID NO: 60354 - DNA, 22 bp, synthetic construct
  misc_feature 1..22: note = chemically synthesized
  source 1..22: mol_type = other DNA
gcttttgatgtccagcctacat

SEQ ID NO: 60355 - DNA, 22 bp, synthetic construct
  misc_feature 1..22: note = chemically synthesized
  source 1..22: mol_type = other DNA
cttttgatgtccagcctacatg

SEQ ID NO: 60356 - DNA, 22 bp, synthetic construct
  misc_feature 1..22: note = chemically synthesized
  source 1..22: mol_type = other DNA
ttgatgtccagcctacatgcat

SEQ ID NO: 60357 - DNA, 22 bp, synthetic construct
  misc_feature 1..22: note = chemically synthesized
  source 1..22: mol_type = other DNA
tgatgtccagcctacatgcatt

SEQ ID NO: 60358 - DNA, 22 bp, synthetic construct
  misc_feature 1..22: note = chemically synthesized
  source 1..22: mol_type = other DNA
gatgtccagcctacatgcattt

SEQ ID NO: 60359 - DNA, 22 bp, synthetic construct
  misc_feature 1..22: note = chemically synthesized
  source 1..22: mol_type = other DNA
atgtccagcctacatgcatttc

SEQ ID NO: 60360 - DNA, 22 bp, synthetic construct
  misc_feature 1..22: note = chemically synthesized
  source 1..22: mol_type = other DNA
catgcatttcaagggatttata

SEQ ID NO: 60361 - DNA, 22 bp, synthetic construct
  misc_feature 1..22: note = chemically synthesized
  source 1..22: mol_type = other DNA
caagggatttatactacaaaga

SEQ ID NO: 60362 - DNA, 22 bp, synthetic construct
  misc_feature 1..22: note = chemically synthesized
  source 1..22: mol_type = other DNA
aagggatttatactacaaagat

SEQ ID NO: 60363 - DNA, 22 bp, synthetic construct
  misc_feature 1..22: note = chemically synthesized
  source 1..22: mol_type = other DNA
atactacaaagattcaggtttt

SEQ ID NO: 60364 - DNA, 22 bp, synthetic construct
  misc_feature 1..22: note = chemically synthesized
  source 1..22: mol_type = other DNA
tactacaaagattcaggtttta

SEQ ID NO: 60365 - DNA, 22 bp, synthetic construct
  misc_feature 1..22: note = chemically synthesized
  source 1..22: mol_type = other DNA
caaagattcaggttttaagttt

SEQ ID NO: 60366 - DNA, 22 bp, synthetic construct
  misc_feature 1..22: note = chemically synthesized
  source 1..22: mol_type = other DNA
aggttttaagtttgcaaagacg

SEQ ID NO: 60367 - DNA, 22 bp, synthetic construct
  misc_feature 1..22: note = chemically synthesized
  source 1..22: mol_type = other DNA
taagtttgcaaagacgtcatat

SEQ ID NO: 60368 - DNA, 22 bp, synthetic construct
  misc_feature 1..22: note = chemically synthesized
  source 1..22: mol_type = other DNA
aagtttgcaaagacgtcatata

SEQ ID NO: 60369 - DNA, 22 bp, synthetic construct
  misc_feature 1..22: note = chemically synthesized
  source 1..22: mol_type = other DNA
agtttgcaaagacgtcatatag

SEQ ID NO: 60370 - DNA, 22 bp, synthetic construct
  misc_feature 1..22: note = chemically synthesized
  source 1..22: mol_type = other DNA
gcaaagacgtcatataggtaca

SEQ ID NO: 60371 - DNA, 22 bp, synthetic construct
  misc_feature 1..22: note = chemically synthesized
  source 1..22: mol_type = other DNA
caaagacgtcatataggtacat

SEQ ID NO: 60372 - DNA, 22 bp, synthetic construct
  misc_feature 1..22: note = chemically synthesized
  source 1..22: mol_type = other DNA
agaattctatggtaggcacaag

SEQ ID NO: 60373 - DNA, 22 bp, synthetic construct
  misc_feature 1..22: note = chemically synthesized
  source 1..22: mol_type = other DNA
tatggtaggcacaagctcagct

SEQ ID NO: 60374 - DNA, 22 bp, synthetic construct
  misc_feature 1..22: note = chemically synthesized
  source 1..22: mol_type = other DNA
tggtaggcacaagctcagcttt

SEQ ID NO: 60375 - DNA, 22 bp, synthetic construct
  misc_feature 1..22: note = chemically synthesized
  source 1..22: mol_type = other DNA
agctttccagaagattcaattt

SEQ ID NO: 60376 - DNA, 22 bp, synthetic construct
  misc_feature 1..22: note = chemically synthesized
  source 1..22: mol_type = other DNA
tccagaagattcaatttgcaaa

SEQ ID NO: 60377 - DNA, 22 bp, synthetic construct
  misc_feature 1..22: note = chemically synthesized
  source 1..22: mol_type = other DNA
ccagaagattcaatttgcaaag

SEQ ID NO: 60378 - DNA, 22 bp, synthetic construct
  misc_feature 1..22: note = chemically synthesized
  source 1..22: mol_type = other DNA
cagaagattcaatttgcaaaga

SEQ ID NO: 60379 - DNA, 22 bp, synthetic construct
  misc_feature 1..22: note = chemically synthesized
  source 1..22: mol_type = other DNA
aatttgcaaagattccttttac

SEQ ID NO: 60380 - DNA, 22 bp, synthetic construct
  misc_feature 1..22: note = chemically synthesized
  source 1..22: mol_type = other DNA
gcaaagattccttttacacacc

SEQ ID NO: 60381 - DNA, 22 bp, synthetic construct
  misc_feature 1..22: note = chemically synthesized
  source 1..22: mol_type = other DNA
caaagattccttttacacacca

SEQ ID NO: 60382 - DNA, 22 bp, synthetic construct
  misc_feature 1..22: note = chemically synthesized
  source 1..22: mol_type = other DNA
cttttacacaccatgttcaaga

SEQ ID NO: 60383 - DNA, 22 bp, synthetic construct
  misc_feature 1..22: note = chemically synthesized
  source 1..22: mol_type = other DNA
ttacacaccatgttcaagaaat

SEQ ID NO: 60384 - DNA, 22 bp, synthetic construct
  misc_feature 1..22: note = chemically synthesized
  source 1..22: mol_type = other DNA
tacacaccatgttcaagaaatc

SEQ ID NO: 60385 - DNA, 22 bp, synthetic construct
  misc_feature 1..22: note = chemically synthesized
  source 1..22: mol_type = other DNA
acacaccatgttcaagaaatca

SEQ ID NO: 60386 - DNA, 22 bp, synthetic construct
  misc_feature 1..22: note = chemically synthesized
  source 1..22: mol_type = other DNA
cacaccatgttcaagaaatcaa

SEQ ID NO: 60387 - DNA, 22 bp, synthetic construct
  misc_feature 1..22: note = chemically synthesized
  source 1..22: mol_type = other DNA
aagaaatcaactggacaagcat

SEQ ID NO: 60388 - DNA, 22 bp, synthetic construct
  misc_feature 1..22: note = chemically synthesized
  source 1..22: mol_type = other DNA
gacaagcatccagtaaacacct

SEQ ID NO: 60389 - DNA, 22 bp, synthetic construct
  misc_feature 1..22: note = chemically synthesized
  source 1..22: mol_type = other DNA
ttgtgtaccaggcaggaggatg

SEQ ID NO: 60390 - DNA, 22 bp, synthetic construct
  misc_feature 1..22: note = chemically synthesized
  source 1..22: mol_type = other DNA
tgtaccaggcaggaggatgaaa

SEQ ID NO: 60391 - DNA, 22 bp, synthetic construct
  misc_feature 1..22: note = chemically synthesized
  source 1..22: mol_type = other DNA
ctggcctcagattgtacatgtg

SEQ ID NO: 60392 - DNA, 22 bp, synthetic construct
  misc_feature 1..22: note = chemically synthesized
  source 1..22: mol_type = other DNA
gcctcagattgtacatgtggca

SEQ ID NO: 60393 - DNA, 22 bp, synthetic construct
  misc_feature 1..22: note = chemically synthesized
  source 1..22: mol_type = other DNA
agattgtacatgtggcatgaca

SEQ ID NO: 60394 - DNA, 22 bp, synthetic construct
  misc_feature 1..22: note = chemically synthesized
  source 1..22: mol_type = other DNA
tacatgtggcatgacatgaggc

SEQ ID NO: 60395 - DNA, 22 bp, synthetic construct
  misc_feature 1..22: note = chemically synthesized
  source 1..22: mol_type = other DNA
gctctttctggaagggctgtcg

SEQ ID NO: 60396 - DNA, 22 bp, synthetic construct
  misc_feature 1..22: note = chemically synthesized
  source 1..22: mol_type = other DNA
ctctttctggaagggctgtcga

SEQ ID NO: 60397 - DNA, 22 bp, synthetic construct
  misc_feature 1..22: note = chemically synthesized
  source 1..22: mol_type = other DNA
tttctggaagggctgtcgatac

SEQ ID NO: 60398 - DNA, 22 bp, synthetic construct
  misc_feature 1..22: note = chemically synthesized
  source 1..22: mol_type = other DNA
tctggaagggctgtcgatactg

SEQ ID NO: 60399 - DNA, 22 bp, synthetic construct
  misc_feature 1..22: note = chemically synthesized
  source 1..22: mol_type = other DNA
ctggaagggctgtcgatactgg

SEQ ID NO: 60400 - DNA, 22 bp, synthetic construct
  misc_feature 1..22: note = chemically synthesized
  source 1..22: mol_type = other DNA
tggaagggctgtcgatactggg

SEQ ID NO: 60401 - DNA, 22 bp, synthetic construct
  misc_feature 1..22: note = chemically synthesized
  source 1..22: mol_type = other DNA
gaagggctgtcgatactgggaa

SEQ ID NO: 60402 - DNA, 22 bp, synthetic construct
  misc_feature 1..22: note = chemically synthesized
  source 1..22: mol_type = other DNA
tcgatactgggaagaaacaaag

SEQ ID NO: 60403 - DNA, 22 bp, synthetic construct
  misc_feature 1..22: note = chemically synthesized
  source 1..22: mol_type = other DNA
ggaagaaacaaaggcgaattta

SEQ ID NO: 60404 - DNA, 22 bp, synthetic construct
  misc_feature 1..22: note = chemically synthesized
  source 1..22: mol_type = other DNA
atgatcctcccttgcagatgca

SEQ ID NO: 60405 - DNA, 22 bp, synthetic construct
  misc_feature 1..22: note = chemically synthesized
  source 1..22: mol_type = other DNA
tgatcctcccttgcagatgcac

SEQ ID NO: 60406 - DNA, 22 bp, synthetic construct
  misc_feature 1..22: note = chemically synthesized
  source 1..22: mol_type = other DNA
ccttgcagatgcacagcagatt

SEQ ID NO: 60407 - DNA, 22 bp, synthetic construct
  misc_feature 1..22: note = chemically synthesized
  source 1..22: mol_type = other DNA
gcagatgcacagcagattccga

SEQ ID NO: 60408 - DNA, 22 bp, synthetic construct
  misc_feature 1..22: note = chemically synthesized
  source 1..22: mol_type = other DNA
cagatgcacagcagattccgag

SEQ ID NO: 60409 - DNA, 22 bp, synthetic construct
  misc_feature 1..22: note = chemically synthesized
  source 1..22: mol_type = other DNA
cgagtgaaatggcctgctctga

SEQ ID NO: 60410 - DNA, 22 bp, synthetic construct
  misc_feature 1..22: note = chemically synthesized
  source 1..22: mol_type = other DNA
ctctgaatctaggtgctggagt

SEQ ID NO: 60411 - DNA, 22 bp, synthetic construct
  misc_feature 1..22: note = chemically synthesized
  source 1..22: mol_type = other DNA
tgaatctaggtgctggagtcca

SEQ ID NO: 60412 - DNA, 22 bp, synthetic construct
  misc_feature 1..22: note = chemically synthesized
  source 1..22: mol_type = other DNA
aatctaggtgctggagtccaaa

SEQ ID NO: 60413 - DNA, 22 bp, synthetic construct
  misc_feature 1..22: note = chemically synthesized
  source 1..22: mol_type = other DNA
ggtgctggagtccaaagttgat

SEQ ID NO: 60414 - DNA, 22 bp, synthetic construct
  misc_feature 1..22: note = chemically synthesized
  source 1..22: mol_type = other DNA
gagtccaaagttgatgctcttt

SEQ ID NO: 60415 - DNA, 22 bp, synthetic construct
  misc_feature 1..22: note = chemically synthesized
  source 1..22: mol_type = other DNA
atgctctttccactttgtttgc

SEQ ID NO: 60416 - DNA, 22 bp, synthetic construct
  misc_feature 1..22: note = chemically synthesized
  source 1..22: mol_type = other DNA
tttccactttgtttgcaaagac

SEQ ID NO: 60417 - DNA, 22 bp, synthetic construct
  misc_feature 1..22: note = chemically synthesized
  source 1..22: mol_type = other DNA
tccactttgtttgcaaagacct

SEQ ID NO: 60418 - DNA, 22 bp, synthetic construct
  misc_feature 1..22: note = chemically synthesized
  source 1..22: mol_type = other DNA
ccactttgtttgcaaagacctc

SEQ ID NO: 60419 - DNA, 22 bp, synthetic construct
  misc_feature 1..22: note = chemically synthesized
  source 1..22: mol_type = other DNA
cactttgtttgcaaagacctca

SEQ ID NO: 60420 - DNA, 22 bp, synthetic construct
  misc_feature 1..22: note = chemically synthesized
  source 1..22: mol_type = other DNA
tgtttgcaaagacctcactcca

SEQ ID NO: 60421 - DNA, 22 bp, synthetic construct
  misc_feature 1..22: note = chemically synthesized
  source 1..22: mol_type = other DNA
gtttgcaaagacctcactccag

SEQ ID NO: 60422 - DNA, 22 bp, synthetic construct
  misc_feature 1..22: note = chemically synthesized
  source 1..22: mol_type = other DNA
tttgcaaagacctcactccaga

SEQ ID NO: 60423 - DNA, 22 bp, synthetic construct
  misc_feature 1..22: note = chemically synthesized
  source 1..22: mol_type = other DNA
gcaaagacctcactccagagag

SEQ ID NO: 60424 - DNA, 22 bp, synthetic construct
  misc_feature 1..22: note = chemically synthesized
  source 1..22: mol_type = other DNA
caaagacctcactccagagagc

SEQ ID NO: 60425 - DNA, 22 bp, synthetic construct
  misc_feature 1..22: note = chemically synthesized
  source 1..22: mol_type = other DNA
actccagagagccagtgcacaa

SEQ ID NO: 60426 - DNA, 22 bp, synthetic construct
  misc_feature 1..22: note = chemically synthesized
  source 1..22: mol_type = other DNA
cagagagccagtgcacaaagac

SEQ ID NO: 60427 - DNA, 22 bp, synthetic construct
  misc_feature 1..22: note = chemically synthesized
  source 1..22: mol_type = other DNA
acagtgactccatgaggtaagg

SEQ ID NO: 60428 - DNA, 22 bp, synthetic construct
  misc_feature 1..22: note = chemically synthesized
  source 1..22: mol_type = other DNA
catgaggtaaggtcagagttat

SEQ ID NO: 60429 - DNA, 22 bp, synthetic construct
  misc_feature 1..22: note = chemically synthesized
  source 1..22: mol_type = other DNA
tccccatcgagcccgccatcgc

SEQ ID NO: 60430 - DNA, 22 bp, synthetic construct
  misc_feature 1..22: note = chemically synthesized
  source 1..22: mol_type = other DNA
atggtttgctgacagaggtggc

SEQ ID NO: 60431 - DNA, 22 bp, synthetic construct
  misc_feature 1..22: note = chemically synthesized
  source 1..22: mol_type = other DNA
gctgacagaggtggcagaggtg

SEQ ID NO: 60432 - DNA, 22 bp, synthetic construct
  misc_feature 1..22: note = chemically synthesized
  source 1..22: mol_type = other DNA
ctgacagaggtggcagaggtgg

SEQ ID NO: 60433 - DNA, 22 bp, synthetic construct
  misc_feature 1..22: note = chemically synthesized
  source 1..22: mol_type = other DNA
acagaggtggcagaggtggttc

SEQ ID NO: 60434 - DNA, 22 bp, synthetic construct
  misc_feature 1..22: note = chemically synthesized
  source 1..22: mol_type = other DNA
tccttcctgttgcctgtaattg

SEQ ID NO: 60435 - DNA, 22 bp, synthetic construct
  misc_feature 1..22: note = chemically synthesized
  source 1..22: mol_type = other DNA
cttcctgttgcctgtaattgga

SEQ ID NO: 60436 - DNA, 22 bp, synthetic construct
  misc_feature 1..22: note = chemically synthesized
  source 1..22: mol_type = other DNA
cctgttgcctgtaattggaatt

SEQ ID NO: 60437 - DNA, 22 bp, synthetic construct
  misc_feature 1..22: note = chemically synthesized
  source 1..22: mol_type = other DNA
ctgttgcctgtaattggaattg

SEQ ID NO: 60438 - DNA, 22 bp, synthetic construct
  misc_feature 1..22: note = chemically synthesized
  source 1..22: mol_type = other DNA
ttgcctgtaattggaattgtat

SEQ ID NO: 60439 - DNA, 22 bp, synthetic construct
  misc_feature 1..22: note = chemically synthesized
  source 1..22: mol_type = other DNA
cctgtaattggaattgtatttg

SEQ ID NO: 60440 - DNA, 22 bp, synthetic construct
  misc_feature 1..22: note = chemically synthesized
  source 1..22: mol_type = other DNA
taattggaattgtatttgcaat

SEQ ID NO: 60441 - DNA, 22 bp, synthetic construct
  misc_feature 1..22: note = chemically synthesized
  source 1..22: mol_type = other DNA
gaattgtatttgcaatgtgctt

SEQ ID NO: 60442 - DNA, 22 bp, synthetic construct
  misc_feature 1..22: note = chemically synthesized
  source 1..22: mol_type = other DNA
tatttgcaatgtgcttttggca

SEQ ID NO: 60443 - DNA, 22 bp, synthetic construct
  misc_feature 1..22: note = chemically synthesized
  source 1..22: mol_type = other DNA
gcaatgtgcttttggcagcttc

SEQ ID NO: 60444 - DNA, 22 bp, synthetic construct
  misc_feature 1..22: note = chemically synthesized
  source 1..22: mol_type = other DNA
caatgtgcttttggcagcttcc

SEQ ID NO: 60445 - DNA, 22 bp, synthetic construct
  misc_feature 1..22: note = chemically synthesized
  source 1..22: mol_type = other DNA
ttggcagcttcctcatcaaagg

SEQ ID NO: 60446 - DNA, 22 bp, synthetic construct
  misc_feature 1..22: note = chemically synthesized
  source 1..22: mol_type = other DNA
tggcagcttcctcatcaaaggc

SEQ ID NO: 60447 - DNA, 22 bp, synthetic construct
  misc_feature 1..22: note = chemically synthesized
  source 1..22: mol_type = other DNA
ggcagcttcctcatcaaaggcc

SEQ ID NO: 60448 - DNA, 22 bp, synthetic construct
  misc_feature 1..22: note = chemically synthesized
  source 1..22: mol_type = other DNA
gcagcttcctcatcaaaggcct

SEQ ID NO: 60449 - DNA, 22 bp, synthetic construct
  misc_feature 1..22: note = chemically synthesized
  source 1..22: mol_type = other DNA
cctcatcaaaggcctcccctgg

SEQ ID NO: 60450 - DNA, 22 bp, synthetic construct
  misc_feature 1..22: note = chemically synthesized
  source 1..22: mol_type = other DNA
ctcatcaaaggcctcccctgga

SEQ ID NO: 60451 - DNA, 22 bp, synthetic construct
  misc_feature 1..22: note = chemically synthesized
  source 1..22: mol_type = other DNA
atcaaaggcctcccctggagca

SEQ ID NO: 60452 - DNA, 22 bp, synthetic construct
  misc_feature 1..22: note = chemically synthesized
  source 1..22: mol_type = other DNA
ccctggagcaagaatagatggg

SEQ ID NO: 60453 - DNA, 22 bp, synthetic construct
  misc_feature 1..22: note = chemically synthesized
  source 1..22: mol_type = other DNA
gagcaagaatagatgggagcta

SEQ ID NO: 60454 - DNA, 22 bp, synthetic construct
  misc_feature 1..22: note = chemically synthesized
  source 1..22: mol_type = other DNA
actttccctgctgctccccttt

SEQ ID NO: 60455 - DNA, 22 bp, synthetic construct
  misc_feature 1..22: note = chemically synthesized
  source 1..22: mol_type = other DNA
tccctgctgctcccctttggga

SEQ ID NO: 60456 - DNA, 22 bp, synthetic construct
  misc_feature 1..22: note = chemically synthesized
  source 1..22: mol_type = other DNA
ccctgctgctcccctttgggac

SEQ ID NO: 60457 - DNA, 22 bp, synthetic construct
  misc_feature 1..22: note = chemically synthesized
  source 1..22: mol_type = other DNA
cctgctgctcccctttgggacc

SEQ ID NO: 60458 - DNA, 22 bp, synthetic construct
  misc_feature 1..22: note = chemically synthesized
  source 1..22: mol_type = other DNA
ctgctcccctttgggaccttgg

SEQ ID NO: 60459 - DNA, 22 bp, synthetic construct
  misc_feature 1..22: note = chemically synthesized
  source 1..22: mol_type = other DNA
ctcccctttgggaccttggcct

SEQ ID NO: 60460 - DNA, 22 bp, synthetic construct
  misc_feature 1..22: note = chemically synthesized
  source 1..22: mol_type = other DNA
ccctttgggaccttggcctctc

SEQ ID NO: 60461 - DNA, 22 bp, synthetic construct
  misc_feature 1..22: note = chemically synthesized
  source 1..22: mol_type = other DNA
tgggaccttggcctctcaccta

SEQ ID NO: 60462 - DNA, 22 bp, synthetic construct
  misc_feature 1..22: note = chemically synthesized
  source 1..22: mol_type = other DNA
gggaccttggcctctcacctac

SEQ ID NO: 60463 - DNA, 22 bp, synthetic construct
  misc_feature 1..22: note = chemically synthesized
  source 1..22: mol_type = other DNA
ggaccttggcctctcacctacc

SEQ ID NO: 60464 - DNA, 22 bp, synthetic construct
  misc_feature 1..22: note = chemically synthesized
  source 1..22: mol_type = other DNA
ggcctctcacctaccggggtcg

SEQ ID NO: 60465 - DNA, 22 bp, synthetic construct
  misc_feature 1..22: note = chemically synthesized
  source 1..22: mol_type = other DNA
gcctctcacctaccggggtcgt

SEQ ID NO: 60466 - DNA, 20 bp, synthetic construct
  misc_feature 1..20: note = chemically synthesized
  source 1..20: mol_type = other DNA
gtaaggctgaggcctggcac

SEQ ID NO: 60467 - DNA, 20 bp, synthetic construct
  misc_feature 1..20: note = chemically synthesized
  source 1..20: mol_type = other DNA
gcctggcacaggtctgttcc

SEQ ID NO: 60468 - DNA, 20 bp, synthetic construct
  misc_feature 1..20: note = chemically synthesized
  source 1..20: mol_type = other DNA
ggtctgttcctggtcatatc

SEQ ID NO: 60469 - DNA, 20 bp, synthetic construct
  misc_feature 1..20: note = chemically synthesized
  source 1..20: mol_type = other DNA
tctgttcctggtcatatctg

SEQ ID NO: 60470 - DNA, 20 bp, synthetic construct
  misc_feature 1..20: note = chemically synthesized
  source 1..20: mol_type = other DNA
ctgttcctggtcatatctgg

SEQ ID NO: 60471 - DNA, 20 bp, synthetic construct
  misc_feature 1..20: note = chemically synthesized
  source 1..20: mol_type = other DNA
tgttcctggtcatatctgga

SEQ ID NO: 60472 - DNA, 20 bp, synthetic construct
  misc_feature 1..20: note = chemically synthesized
  source 1..20: mol_type = other DNA
gttcctggtcatatctggag

SEQ ID NO: 60473 - DNA, 20 bp, synthetic construct
  misc_feature 1..20: note = chemically synthesized
  source 1..20: mol_type = other DNA
ctggtcatatctggagggga

SEQ ID NO: 60474 - DNA, 20 bp, synthetic construct
  misc_feature 1..20: note = chemically synthesized
  source 1..20: mol_type = other DNA
ggtcatatctggaggggatg

SEQ ID NO: 60475 - DNA, 20 bp, synthetic construct
  misc_feature 1..20: note = chemically synthesized
  source 1..20: mol_type = other DNA
ctggaggggatggagaatgt

SEQ ID NO: 60476 - DNA, 20 bp, synthetic construct
  misc_feature 1..20: note = chemically synthesized
  source 1..20: mol_type = other DNA
aggggatggagaatgtgagc

SEQ ID NO: 60477 - DNA, 20 bp, synthetic construct
  misc_feature 1..20: note = chemically synthesized
  source 1..20: mol_type = other DNA
cgttcctccccacccctctc

SEQ ID NO: 60478 - DNA, 20 bp, synthetic construct
  misc_feature 1..20: note = chemically synthesized
  source 1..20: mol_type = other DNA
gaccttaacctcctcatcta

SEQ ID NO: 60479 - DNA, 20 bp, synthetic construct
  misc_feature 1..20: note = chemically synthesized
  source 1..20: mol_type = other DNA
cttaacctcctcatctatag

SEQ ID NO: 60480 - DNA, 20 bp, synthetic construct
  misc_feature 1..20: note = chemically synthesized
  source 1..20: mol_type = other DNA
ttaacctcctcatctataga

SEQ ID NO: 60481 - DNA, 20 bp, synthetic construct
  misc_feature 1..20: note = chemically synthesized
  source 1..20: mol_type = other DNA
taacctcctcatctatagaa

SEQ ID NO: 60482 - DNA, 20 bp, synthetic construct
  misc_feature 1..20: note = chemically synthesized
  source 1..20: mol_type = other DNA
aacctcctcatctatagaag

SEQ ID NO: 60483 - DNA, 20 bp, synthetic construct
  misc_feature 1..20: note = chemically synthesized
  source 1..20: mol_type = other DNA
cctcctcatctatagaaggg

SEQ ID NO: 60484 - DNA, 20 bp, synthetic construct
  misc_feature 1..20: note = chemically synthesized
  source 1..20: mol_type = other DNA
ctcatctatagaaggggaga

SEQ ID NO: 60485 - DNA, 20 bp, synthetic construct
  misc_feature 1..20: note = chemically synthesized
  source 1..20: mol_type = other DNA
ggggagaaagatgcatgccc

SEQ ID NO: 60486 - DNA, 20 bp, synthetic construct
  misc_feature 1..20: note = chemically synthesized
  source 1..20: mol_type = other DNA
gagaaagatgcatgcccaag

SEQ ID NO: 60487 - DNA, 20 bp, synthetic construct
  misc_feature 1..20: note = chemically synthesized
  source 1..20: mol_type = other DNA
aaagatgcatgcccaagcag

SEQ ID NO: 60488 - DNA, 20 bp, synthetic construct
  misc_feature 1..20: note = chemically synthesized
  source 1..20: mol_type = other DNA
aagatgcatgcccaagcagt

SEQ ID NO: 60489 - DNA, 20 bp, synthetic construct
  misc_feature 1..20: note = chemically synthesized
  source 1..20: mol_type = other DNA
gatgcatgcccaagcagtag

SEQ ID NO: 60490 - DNA, 20 bp, synthetic construct
  misc_feature 1..20: note = chemically synthesized
  source 1..20: mol_type = other DNA
tgcatgcccaagcagtagga

SEQ ID NO: 60491 - DNA, 20 bp, synthetic construct
  misc_feature 1..20: note = chemically synthesized
  source 1..20: mol_type = other DNA
gcatgcccaagcagtaggag

SEQ ID NO: 60492 - DNA, 20 bp, synthetic construct
  misc_feature 1..20: note = chemically synthesized
  source 1..20: mol_type = other DNA
tgcccaagcagtaggagagg

SEQ ID NO: 60493 - DNA, 20 bp, synthetic construct
  misc_feature 1..20: note = chemically synthesized
  source 1..20: mol_type = other DNA
caagcagtaggagaggtggt

SEQ ID NO: 60494 - DNA, 20 bp, synthetic construct
  misc_feature 1..20: note = chemically synthesized
  source 1..20: mol_type = other DNA
aagcagtaggagaggtggtg

SEQ ID NO: 60495 - DNA, 20 bp, synthetic construct
  misc_feature 1..20: note = chemically synthesized
  source 1..20: mol_type = other DNA
aggagaggtggtgaggctta

SEQ ID NO: 60496 - DNA, 20 bp, synthetic construct
  misc_feature 1..20: note = chemically synthesized
  source 1..20: mol_type = other DNA
ggagaggtggtgaggcttat

SEQ ID NO: 60497 - DNA, 20 bp, synthetic construct
  misc_feature 1..20: note = chemically synthesized
  source 1..20: mol_type = other DNA
agaggtggtgaggcttatag

SEQ ID NO: 60498 - DNA, 20 bp, synthetic construct
  misc_feature 1..20: note = chemically synthesized
  source 1..20: mol_type = other DNA
gtgaggcttataggagacaa

SEQ ID NO: 60499 - DNA, 20 bp, synthetic construct
  misc_feature 1..20: note = chemically synthesized
  source 1..20: mol_type = other DNA
ggcttataggagacaacaga

SEQ ID NO: 60500 - DNA, 20 bp, synthetic construct
  misc_feature 1..20: note = chemically synthesized
  source 1..20: mol_type = other DNA
gcttataggagacaacagac

SEQ ID NO: 60501 - DNA, 20 bp, synthetic construct
  misc_feature 1..20: note = chemically synthesized
  source 1..20: mol_type = other DNA
ttataggagacaacagacag

SEQ ID NO: 60502 - DNA, 20 bp, synthetic construct
  misc_feature 1..20: note = chemically synthesized
  source 1..20: mol_type = other DNA
caacagacaggagcccccga

SEQ ID NO: 60503 - DNA, 20 bp, synthetic construct
  misc_feature 1..20: note = chemically synthesized
  source 1..20: mol_type = other DNA
agacaggagcccccgacaga

SEQ ID NO: 60504 - DNA, 20 bp, synthetic construct
  misc_feature 1..20: note = chemically synthesized
  source 1..20: mol_type = other DNA
acaggagcccccgacagaca

SEQ ID NO: 60505 - DNA, 20 bp, synthetic construct
  misc_feature 1..20: note = chemically synthesized
  source 1..20: mol_type = other DNA
caggagcccccgacagacag

SEQ ID NO: 60506 - DNA, 20 bp, synthetic construct
  misc_feature 1..20: note = chemically synthesized
  source 1..20: mol_type = other DNA
ggagcccccgacagacagag

SEQ ID NO: 60507 - DNA, 20 bp, synthetic construct
  misc_feature 1..20: note = chemically synthesized
  source 1..20: mol_type = other DNA
agacagaggagctgtgcaaa

SEQ ID NO: 60508 - DNA, 20 bp, synthetic construct
  misc_feature 1..20: note = chemically synthesized
  source 1..20: mol_type = other DNA
agaggagctgtgcaaacaga

SEQ ID NO: 60509 - DNA, 20 bp, synthetic construct
  misc_feature 1..20: note = chemically synthesized
  source 1..20: mol_type = other DNA
gctgtgcaaacagaaagaaa

SEQ ID NO: 60510 - DNA, 20 bp, synthetic construct
  misc_feature 1..20: note = chemically synthesized
  source 1..20: mol_type = other DNA
ttgttgctgttgctgtatct

SEQ ID NO: 60511 - DNA, 20 bp, synthetic construct
  misc_feature 1..20: note = chemically synthesized
  source 1..20: mol_type = other DNA
tgctgttgctgtatcttggc

SEQ ID NO: 60512 - DNA, 20 bp, synthetic construct
  misc_feature 1..20: note = chemically synthesized
  source 1..20: mol_type = other DNA
ttggctggtgtcccccatcc

SEQ ID NO: 60513 - DNA, 20 bp, synthetic construct
  misc_feature 1..20: note = chemically synthesized
  source 1..20: mol_type = other DNA
tggctggtgtcccccatcct

SEQ ID NO: 60514 - DNA, 20 bp, synthetic construct
  misc_feature 1..20: note = chemically synthesized
  source 1..20: mol_type = other DNA
ggctggtgtcccccatcctg

SEQ ID NO: 60515 - DNA, 20 bp, synthetic construct
  misc_feature 1..20: note = chemically synthesized
  source 1..20: mol_type = other DNA
tgtcccccatcctggggtgc

SEQ ID NO: 60516 - DNA, 20 bp, synthetic construct
  misc_feature 1..20: note = chemically synthesized
  source 1..20: mol_type = other DNA
gtcccccatcctggggtgcc

SEQ ID NO: 60517 - DNA, 20 bp, synthetic construct
  misc_feature 1..20: note = chemically synthesized
  source 1..20: mol_type = other DNA
atcctggggtgccaggactg

SEQ ID NO: 60518 - DNA, 20 bp, synthetic construct
  misc_feature 1..20: note = chemically synthesized
  source 1..20: mol_type = other DNA
gggtgccaggactgcagacc

SEQ ID NO: 60519 - DNA, 20 bp, synthetic construct
  misc_feature 1..20: note = chemically synthesized
  source 1..20: mol_type = other DNA
ccctcatccacttctgctta

SEQ ID NO: 60520 - DNA, 20 bp, synthetic construct
  misc_feature 1..20: note = chemically synthesized
  source 1..20: mol_type = other DNA
cctcatccacttctgcttac

SEQ ID NO: 60521 - DNA, 20 bp, synthetic construct
  misc_feature 1..20: note = chemically synthesized
  source 1..20: mol_type = other DNA
ccacttctgcttacaggaac

SEQ ID NO: 60522 - DNA, 20 bp, synthetic construct
  misc_feature 1..20: note = chemically synthesized
  source 1..20: mol_type = other DNA
acaggaaccagtgtatccac

SEQ ID NO: 60523 - DNA, 20 bp, synthetic construct
  misc_feature 1..20: note = chemically synthesized
  source 1..20: mol_type = other DNA
caggaaccagtgtatccacc

SEQ ID NO: 60524 - DNA, 20 bp, synthetic construct
  misc_feature 1..20: note = chemically synthesized
  source 1..20: mol_type = other DNA
ggaaccagtgtatccaccag

SEQ ID NO: 60525 - DNA, 20 bp, synthetic construct
  misc_feature 1..20: note = chemically synthesized
  source 1..20: mol_type = other DNA
gaaccagtgtatccaccagg

SEQ ID NO: 60526 - DNA, 20 bp, synthetic construct
  misc_feature 1..20: note = chemically synthesized
  source 1..20: mol_type = other DNA
tgtatccaccaggaggtacc

SEQ ID NO: 60527 - DNA, 20 bp, synthetic construct
  misc_feature 1..20: note = chemically synthesized
  source 1..20: mol_type = other DNA
gtatccaccaggaggtaccg

SEQ ID NO: 60528 - DNA, 20 bp, synthetic construct
  misc_feature 1..20: note = chemically synthesized
  source 1..20: mol_type = other DNA
tatccaccaggaggtaccga

SEQ ID NO: 60529 - DNA, 20 bp, synthetic construct
  misc_feature 1..20: note = chemically synthesized
  source 1..20: mol_type = other DNA
atccaccaggaggtaccgag

SEQ ID NO: 60530 - DNA, 20 bp, synthetic construct
  misc_feature 1..20: note = chemically synthesized
  source 1..20: mol_type = other DNA
tccaccaggaggtaccgagg

SEQ ID NO: 60531 - DNA, 20 bp, synthetic construct
  misc_feature 1..20: note = chemically synthesized
  source 1..20: mol_type = other DNA
ccaccaggaggtaccgaggg

SEQ ID NO: 60532 - DNA, 20 bp, synthetic construct
  misc_feature 1..20: note = chemically synthesized
  source 1..20: mol_type = other DNA
aggaggtaccgaggggggac

SEQ ID NO: 60533 - DNA, 20 bp, synthetic construct
  misc_feature 1..20: note = chemically synthesized
  source 1..20: mol_type = other DNA
ggaggtaccgaggggggacc

SEQ ID NO: 60534 - DNA, 20 bp, synthetic construct
  misc_feature 1..20: note = chemically synthesized
  source 1..20: mol_type = other DNA
ggtaccgaggggggaccggg

SEQ ID NO: 60535 - DNA, 20 bp, synthetic construct
  misc_feature 1..20: note = chemically synthesized
  source 1..20: mol_type = other DNA
gtaccgaggggggaccgggc

SEQ ID NO: 60536 - DNA, 20 bp, synthetic construct
  misc_feature 1..20: note = chemically synthesized
  source 1..20: mol_type = other DNA
gaggggggaccgggcaggac

SEQ ID NO: 60537 - DNA, 20 bp, synthetic construct
  misc_feature 1..20: note = chemically synthesized
  source 1..20: mol_type = other DNA
aggggggaccgggcaggact

SEQ ID NO: 60538 - DNA, 20 bp, synthetic construct
  misc_feature 1..20: note = chemically synthesized
  source 1..20: mol_type = other DNA
gaccgggcaggactgggaaa

SEQ ID NO: 60539 - DNA, 20 bp, synthetic construct
  misc_feature 1..20: note = chemically synthesized
  source 1..20: mol_type = other DNA
accgggcaggactgggaaac

SEQ ID NO: 60540 - DNA, 20 bp, synthetic construct
  misc_feature 1..20: note = chemically synthesized
  source 1..20: mol_type = other DNA
gaaacaggacacaaccctca

SEQ ID NO: 60541 - DNA, 20 bp, synthetic construct
  misc_feature 1..20: note = chemically synthesized
  source 1..20: mol_type = other DNA
ggctgctgttattatgaaaa

SEQ ID NO: 60542 - DNA, 20 bp, synthetic construct
  misc_feature 1..20: note = chemically synthesized
  source 1..20: mol_type = other DNA
gctgctgttattatgaaaat

SEQ ID NO: 60543 - DNA, 20 bp, synthetic construct
  misc_feature 1..20: note = chemically synthesized
  source 1..20: mol_type = other DNA
tgctgttattatgaaaatag

SEQ ID NO: 60544 - DNA, 20 bp, synthetic construct
  misc_feature 1..20: note = chemically synthesized
  source 1..20: mol_type = other DNA
ttattatgaaaataggagct

SEQ ID NO: 60545 - DNA, 20 bp, synthetic construct
  misc_feature 1..20: note = chemically synthesized
  source 1..20: mol_type = other DNA
tgaaaataggagctcagctg

SEQ ID NO: 60546 - DNA, 20 bp, synthetic construct
  misc_feature 1..20: note = chemically synthesized
  source 1..20: mol_type = other DNA
tctccatctgccctgcacct

SEQ ID NO: 60547 - DNA, 20 bp, synthetic construct
  misc_feature 1..20: note = chemically synthesized
  source 1..20: mol_type = other DNA
ccatctgccctgcacctcag

SEQ ID NO: 60548 - DNA, 20 bp, synthetic construct
  misc_feature 1..20: note = chemically synthesized
  source 1..20: mol_type = other DNA
catctgccctgcacctcagc

SEQ ID NO: 60549 - DNA, 20 bp, synthetic construct
  misc_feature 1..20: note = chemically synthesized
  source 1..20: mol_type = other DNA
ctgccctgcacctcagcagg

SEQ ID NO: 60550 - DNA, 20 bp, synthetic construct
  misc_feature 1..20: note = chemically synthesized
  source 1..20: mol_type = other DNA
ccacaacccccctcctgccc

SEQ ID NO: 60551 - DNA, 20 bp, synthetic construct
  misc_feature 1..20: note = chemically synthesized
  source 1..20: mol_type = other DNA
ccccagacctgctgcctgcc

SEQ ID NO: 60552 - DNA, 20 bp, synthetic construct
  misc_feature 1..20: note = chemically synthesized
  source 1..20: mol_type = other DNA
cccagacctgctgcctgcct

SEQ ID NO: 60553 - DNA, 20 bp, synthetic construct
  misc_feature 1..20: note = chemically synthesized
  source 1..20: mol_type = other DNA
cctgctgcctgcctgggcca

SEQ ID NO: 60554 - DNA, 20 bp, synthetic construct
  misc_feature 1..20: note = chemically synthesized
  source 1..20: mol_type = other DNA
ctgctgcctgcctgggccat

SEQ ID NO: 60555 - DNA, 20 bp, synthetic construct
  misc_feature 1..20: note = chemically synthesized
  source 1..20: mol_type = other DNA
tgctgcctgcctgggccatg

SEQ ID NO: 60556 - DNA, 20 bp, synthetic construct
  misc_feature 1..20: note = chemically synthesized
  source 1..20: mol_type = other DNA
ctgcctgcctgggccatggg

SEQ ID NO: 60557 - DNA, 20 bp, synthetic construct
  misc_feature 1..20: note = chemically synthesized
  source 1..20: mol_type = other DNA
tgcctgggccatggggagct

SEQ ID NO: 60558 - DNA, 20 bp, synthetic construct
  misc_feature 1..20: note = chemically synthesized
  source 1..20: mol_type = other DNA
ctgggccatggggagctcag

SEQ ID NO: 60559 - DNA, 20 bp, synthetic construct
  misc_feature 1..20: note = chemically synthesized
  source 1..20: mol_type = other DNA
ggggagctcagaagcctctc

SEQ ID NO: 60560 - DNA, 20 bp, synthetic construct
  misc_feature 1..20: note = chemically synthesized
  source 1..20: mol_type = other DNA
agcctctccagaacctctcg

SEQ ID NO: 60561 - DNA, 20 bp, synthetic construct
  misc_feature 1..20: note = chemically synthesized
  source 1..20: mol_type = other DNA
tccagaacctctcgcagtga

SEQ ID NO: 60562 - DNA, 20 bp, synthetic construct
  misc_feature 1..20: note = chemically synthesized
  source 1..20: mol_type = other DNA
ccagaacctctcgcagtgaa

SEQ ID NO: 60563 - DNA, 20 bp, synthetic construct
  misc_feature 1..20: note = chemically synthesized
  source 1..20: mol_type = other DNA
atacttacgattcactgtcc

SEQ ID NO: 60564 - DNA, 20 bp, synthetic construct
  misc_feature 1..20: note = chemically synthesized
  source 1..20: mol_type = other DNA
tacttacgattcactgtccc

SEQ ID NO: 60565 - DNA, 20 bp, synthetic construct
  misc_feature 1..20: note = chemically synthesized
  source 1..20: mol_type = other DNA
tacgattcactgtcccaggt

SEQ ID NO: 60566 - DNA, 20 bp, synthetic construct
  misc_feature 1..20: note = chemically synthesized
  source 1..20: mol_type = other DNA
gattcactgtcccaggtcag

SEQ ID NO: 60567 - DNA, 20 bp, synthetic construct
  misc_feature 1..20: note = chemically synthesized
  source 1..20: mol_type = other DNA
tcactgtcccaggtcagtgg

SEQ ID NO: 60568 - DNA, 20 bp, synthetic construct
  misc_feature 1..20: note = chemically synthesized
  source 1..20: mol_type = other DNA
caggtcagtggtggtgcctg

SEQ ID NO: 60569 - DNA, 20 bp, synthetic construct
  misc_feature 1..20: note = chemically synthesized
  source 1..20: mol_type = other DNA
cagtggtggtgcctgaagct

SEQ ID NO: 60570 - DNA, 20 bp, synthetic construct
  misc_feature 1..20: note = chemically synthesized
  source 1..20: mol_type = other DNA
agtggtggtgcctgaagctg

SEQ ID NO: 60571 - DNA, 20 bp, synthetic construct
  misc_feature 1..20: note = chemically synthesized
  source 1..20: mol_type = other DNA
tggtggtgcctgaagctgag

SEQ ID NO: 60572 - DNA, 20 bp, synthetic construct
  misc_feature 1..20: note = chemically synthesized
  source 1..20: mol_type = other DNA
ggtgcctgaagctgaggaga

SEQ ID NO: 60573 - DNA, 20 bp, synthetic construct
  misc_feature 1..20: note = chemically synthesized
  source 1..20: mol_type = other DNA
gtgcctgaagctgaggagac

SEQ ID NO: 60574 - DNA, 20 bp, synthetic construct
  misc_feature 1..20: note = chemically synthesized
  source 1..20: mol_type = other DNA
tgcctgaagctgaggagaca

SEQ ID NO: 60575 - DNA, 20 bp, synthetic construct
  misc_feature 1..20: note = chemically synthesized
  source 1..20: mol_type = other DNA
ccctgtcctcgtccgtattt

SEQ ID NO: 60576 - DNA, 20 bp, synthetic construct
  misc_feature 1..20: note = chemically synthesized
  source 1..20: mol_type = other DNA
tgtcctcgtccgtatttaag

SEQ ID NO: 60577 - DNA, 20 bp, synthetic construct
  misc_feature 1..20: note = chemically synthesized
  source 1..20: mol_type = other DNA
cctcgtccgtatttaagcag

SEQ ID NO: 60578 - DNA, 20 bp, synthetic construct
  misc_feature 1..20: note = chemically synthesized
  source 1..20: mol_type = other DNA
ccgtatttaagcagtggatc

SEQ ID NO: 60579 - DNA, 20 bp, synthetic construct
  misc_feature 1..20: note = chemically synthesized
  source 1..20: mol_type = other DNA
gtatttaagcagtggatcca

SEQ ID NO: 60580 - DNA, 20 bp, synthetic construct
  misc_feature 1..20: note = chemically synthesized
  source 1..20: mol_type = other DNA
tatttaagcagtggatccag

SEQ ID NO: 60581 - DNA, 20 bp, synthetic construct
  misc_feature 1..20: note = chemically synthesized
  source 1..20: mol_type = other DNA
atttaagcagtggatccaga

SEQ ID NO: 60582 - DNA, 20 bp, synthetic construct
  misc_feature 1..20: note = chemically synthesized
  source 1..20: mol_type = other DNA
tttaagcagtggatccagag

SEQ ID NO: 60583 - DNA, 20 bp, synthetic construct
  misc_feature 1..20: note = chemically synthesized
  source 1..20: mol_type = other DNA
cagtggatccagaggggcaa

SEQ ID NO: 60584 - DNA, 20 bp, synthetic construct
  misc_feature 1..20: note = chemically synthesized
  source 1..20: mol_type = other DNA
agtggatccagaggggcaac

SEQ ID NO: 60585 - DNA, 20 bp, synthetic construct
  misc_feature 1..20: note = chemically synthesized
  source 1..20: mol_type = other DNA
gtggatccagaggggcaacg

SEQ ID NO: 60586 - DNA, 20 bp, synthetic construct
  misc_feature 1..20: note = chemically synthesized
  source 1..20: mol_type = other DNA
tggatccagaggggcaacgg

SEQ ID NO: 60587 - DNA, 20 bp, synthetic construct
  misc_feature 1..20: note = chemically synthesized
  source 1..20: mol_type = other DNA
gatccagaggggcaacgggg

SEQ ID NO: 60588 - DNA, 20 bp, synthetic construct
  misc_feature 1..20: note = chemically synthesized
  source 1..20: mol_type = other DNA
atccagaggggcaacggggg

SEQ ID NO: 60589 - DNA, 20 bp, synthetic construct
  misc_feature 1..20: note = chemically synthesized
  source 1..20: mol_type = other DNA
ggggcaacgggggaggctgc

SEQ ID NO: 60590 - DNA, 20 bp, synthetic construct
  misc_feature 1..20: note = chemically synthesized
  source 1..20: mol_type = other DNA
gctgctggtgaatattaacc

SEQ ID NO: 60591 - DNA, 20 bp, synthetic construct
  misc_feature 1..20: note = chemically synthesized
  source 1..20: mol_type = other DNA
ctgctggtgaatattaacca

SEQ ID NO: 60592 - DNA, 20 bp, synthetic construct
  misc_feature 1..20: note = chemically synthesized
  source 1..20: mol_type = other DNA
aatattaaccaaggtcaccc

SEQ ID NO: 60593 - DNA, 20 bp, synthetic construct
  misc_feature 1..20: note = chemically synthesized
  source 1..20: mol_type = other DNA
accaaggtcaccccagttat

SEQ ID NO: 60594 - DNA, 20 bp, synthetic construct
  misc_feature 1..20: note = chemically synthesized
  source 1..20: mol_type = other DNA
caaggtcaccccagttatcg

SEQ ID NO: 60595 - DNA, 20 bp, synthetic construct
  misc_feature 1..20: note = chemically synthesized
  source 1..20: mol_type = other DNA
aaggtcaccccagttatcgg

SEQ ID NO: 60596 - DNA, 20 bp, synthetic construct
  misc_feature 1..20: note = chemically synthesized
  source 1..20: mol_type = other DNA
ggtcaccccagttatcggag

SEQ ID NO: 60597 - DNA, 20 bp, synthetic construct
  misc_feature 1..20: note = chemically synthesized
  source 1..20: mol_type = other DNA
ccagttatcggaggagcaaa

SEQ ID NO: 60598 - DNA, 20 bp, synthetic construct
  misc_feature 1..20: note = chemically synthesized
  source 1..20: mol_type = other DNA
cagttatcggaggagcaaac

SEQ ID NO: 60599 - DNA, 20 bp, synthetic construct
  misc_feature 1..20: note = chemically synthesized
  source 1..20: mol_type = other DNA
agttatcggaggagcaaaca

SEQ ID NO: 60600 - DNA, 20 bp, synthetic construct
  misc_feature 1..20: note = chemically synthesized
  source 1..20: mol_type = other DNA
gttatcggaggagcaaacag

SEQ ID NO: 60601 - DNA, 20 bp, synthetic construct
  misc_feature 1..20: note = chemically synthesized
  source 1..20: mol_type = other DNA
cggaggagcaaacaggggct

SEQ ID NO: 60602 - DNA, 20 bp, synthetic construct
  misc_feature 1..20: note = chemically synthesized
  source 1..20: mol_type = other DNA
caaacaggggctaagtccac

SEQ ID NO: 60603 - DNA, 20 bp, synthetic construct
  misc_feature 1..20: note = chemically synthesized
  source 1..20: mol_type = other DNA
caggggctaagtccactggc

SEQ ID NO: 60604 - DNA, 20 bp, synthetic construct
  misc_feature 1..20: note = chemically synthesized
  source 1..20: mol_type = other DNA
aggggctaagtccactggct

SEQ ID NO: 60605 - DNA, 20 bp, synthetic construct
  misc_feature 1..20: note = chemically synthesized
  source 1..20: mol_type = other DNA
aagtccactggctgggatct

SEQ ID NO: 60606 - DNA, 20 bp, synthetic construct
  misc_feature 1..20: note = chemically synthesized
  source 1..20: mol_type = other DNA
agtcgcccgcctacgctgcc

SEQ ID NO: 60607 - DNA, 20 bp, synthetic construct
  misc_feature 1..20: note = chemically synthesized
  source 1..20: mol_type = other DNA
cgctgcccggacgctttgcc

SEQ ID NO: 60608 - DNA, 20 bp, synthetic construct
  misc_feature 1..20: note = chemically synthesized
  source 1..20: mol_type = other DNA
gctgcccggacgctttgcct

SEQ ID NO: 60609 - DNA, 20 bp, synthetic construct
  misc_feature 1..20: note = chemically synthesized
  source 1..20: mol_type = other DNA
gcccggacgctttgcctggg

SEQ ID NO: 60610 - DNA, 20 bp, synthetic construct
  misc_feature 1..20: note = chemically synthesized
  source 1..20: mol_type = other DNA
cgctttgcctgggcagtgta

SEQ ID NO: 60611 - DNA, 20 bp, synthetic construct
  misc_feature 1..20: note = chemically synthesized
  source 1..20: mol_type = other DNA
gcttccactgcacttaccga

SEQ ID NO: 60612 - DNA, 20 bp, synthetic construct
  misc_feature 1..20: note = chemically synthesized
  source 1..20: mol_type = other DNA
cttccactgcacttaccgaa

SEQ ID NO: 60613 - DNA, 20 bp, synthetic construct
  misc_feature 1..20: note = chemically synthesized
  source 1..20: mol_type = other DNA
tccactgcacttaccgaaag

SEQ ID NO: 60614 - DNA, 20 bp, synthetic construct
  misc_feature 1..20: note = chemically synthesized
  source 1..20: mol_type = other DNA
ccgaaaggagtcattgtacc

SEQ ID NO: 60615 - DNA, 20 bp, synthetic construct
  misc_feature 1..20: note = chemically synthesized
  source 1..20: mol_type = other DNA
aggagtcattgtacctggct

SEQ ID NO: 60616 - DNA, 20 bp, synthetic construct
  misc_feature 1..20: note = chemically synthesized
  source 1..20: mol_type = other DNA
tgtacctggctcagaaacca

SEQ ID NO: 60617 - DNA, 20 bp, synthetic construct
  misc_feature 1..20: note = chemically synthesized
  source 1..20: mol_type = other DNA
aaccacagcgtcctgtgtcc

SEQ ID NO: 60618 - DNA, 20 bp, synthetic construct
  misc_feature 1..20: note = chemically synthesized
  source 1..20: mol_type = other DNA
accacagcgtcctgtgtcca

SEQ ID NO: 60619 - DNA, 20 bp, synthetic construct
  misc_feature 1..20: note = chemically synthesized
  source 1..20: mol_type = other DNA
acagcgtcctgtgtccaagg

SEQ ID NO: 60620 - DNA, 20 bp, synthetic construct
  misc_feature 1..20: note = chemically synthesized
  source 1..20: mol_type = other DNA
agcgtcctgtgtccaaggtg

SEQ ID NO: 60621 - DNA, 20 bp, synthetic construct
  misc_feature 1..20: note = chemically synthesized
  source 1..20: mol_type = other DNA
gcgtcctgtgtccaaggtgg

SEQ ID NO: 60622 - DNA, 20 bp, synthetic construct
  misc_feature 1..20: note = chemically synthesized
  source 1..20: mol_type = other DNA
cgtcctgtgtccaaggtgga

SEQ ID NO: 60623 - DNA, 20 bp, synthetic construct
  misc_feature 1..20: note = chemically synthesized
  source 1..20: mol_type = other DNA
gtcctgtgtccaaggtggag

SEQ ID NO: 60624 - DNA, 20 bp, synthetic construct
  misc_feature 1..20: note = chemically synthesized
  source 1..20: mol_type = other DNA
tcctgtgtccaaggtggagg

SEQ ID NO: 60625 - DNA, 20 bp, synthetic construct
  misc_feature 1..20: note = chemically synthesized
  source 1..20: mol_type = other DNA
tgtgtccaaggtggaggggg

SEQ ID NO: 60626 - DNA, 20 bp, synthetic construct
  misc_feature 1..20: note = chemically synthesized
  source 1..20: mol_type = other DNA
caaggtggagggggtggcgt

SEQ ID NO: 60627 - DNA, 20 bp, synthetic construct
  misc_feature 1..20: note = chemically synthesized
  source 1..20: mol_type = other DNA
gtggagggggtggcgtgagt

SEQ ID NO: 60628 - DNA, 20 bp, synthetic construct
  misc_feature 1..20: note = chemically synthesized
  source 1..20: mol_type = other DNA
agggggtggcgtgagtcaga

SEQ ID NO: 60629 - DNA, 20 bp, synthetic construct
  misc_feature 1..20: note = chemically synthesized
  source 1..20: mol_type = other DNA
ggcgtgagtcagacagtctc

SEQ ID NO: 60630 - DNA, 20 bp, synthetic construct
  misc_feature 1..20: note = chemically synthesized
  source 1..20: mol_type = other DNA
gcgtgagtcagacagtctct

SEQ ID NO: 60631 - DNA, 20 bp, synthetic construct
  misc_feature 1..20: note = chemically synthesized
  source 1..20: mol_type = other DNA
gtgagtcagacagtctctgg

SEQ ID NO: 60632 - DNA, 20 bp, synthetic construct
  misc_feature 1..20: note = chemically synthesized
  source 1..20: mol_type = other DNA
gagtcagacagtctctggga

SEQ ID NO: 60633 - DNA, 20 bp, synthetic construct
  misc_feature 1..20: note = chemically synthesized
  source 1..20: mol_type = other DNA
gtctctgggagagtaccact

SEQ ID NO: 60634 - DNA, 20 bp, synthetic construct
  misc_feature 1..20: note = chemically synthesized
  source 1..20: mol_type = other DNA
ctgggagagtaccacttagc

SEQ ID NO: 60635 - DNA, 20 bp, synthetic construct
  misc_feature 1..20: note = chemically synthesized
  source 1..20: mol_type = other DNA
ctggccctctgctctcactg

SEQ ID NO: 60636 - DNA, 20 bp, synthetic construct
  misc_feature 1..20: note = chemically synthesized
  source 1..20: mol_type = other DNA
tgctctcactgcagaatcct

SEQ ID NO: 60637 - DNA, 20 bp, synthetic construct
  misc_feature 1..20: note = chemically synthesized
  source 1..20: mol_type = other DNA
tctcactgcagaatccttag

SEQ ID NO: 60638 - DNA, 20 bp, synthetic construct
  misc_feature 1..20: note = chemically synthesized
  source 1..20: mol_type = other DNA
atccttagtggctgttccac

SEQ ID NO: 60639 - DNA, 20 bp, synthetic construct
  misc_feature 1..20: note = chemically synthesized
  source 1..20: mol_type = other DNA
cttagtggctgttccactgg

SEQ ID NO: 60640 - DNA, 20 bp, synthetic construct
  misc_feature 1..20: note = chemically synthesized
  source 1..20: mol_type = other DNA
gtggctgttccactggtagc

SEQ ID NO: 60641 - DNA, 20 bp, synthetic construct
  misc_feature 1..20: note = chemically synthesized
  source 1..20: mol_type = other DNA
agcaagatctaccatttact

SEQ ID NO: 60642 - DNA, 20 bp, synthetic construct
  misc_feature 1..20: note = chemically synthesized
  source 1..20: mol_type = other DNA
ccccaaaatgcctgatgctg

SEQ ID NO: 60643 - DNA, 20 bp, synthetic construct
  misc_feature 1..20: note = chemically synthesized
  source 1..20: mol_type = other DNA
ctgaagacttactgccgccc

SEQ ID NO: 60644 - DNA, 20 bp, synthetic construct
  misc_feature 1..20: note = chemically synthesized
  source 1..20: mol_type = other DNA
tgaagacttactgccgccct

SEQ ID NO: 60645 - DNA, 20 bp, synthetic construct
  misc_feature 1..20: note = chemically synthesized
  source 1..20: mol_type = other DNA
aagacttactgccgccctgg

SEQ ID NO: 60646 - DNA, 20 bp, synthetic construct
  misc_feature 1..20: note = chemically synthesized
  source 1..20: mol_type = other DNA
ttactgccgccctgggagat

SEQ ID NO: 60647 - DNA, 20 bp, synthetic construct
  misc_feature 1..20: note = chemically synthesized
  source 1..20: mol_type = other DNA
actgccgccctgggagatca

SEQ ID NO: 60648 - DNA, 20 bp, synthetic construct
  misc_feature 1..20: note = chemically synthesized
  source 1..20: mol_type = other DNA
gccgccctgggagatcagag

SEQ ID NO: 60649 - DNA, 20 bp, synthetic construct
  misc_feature 1..20: note = chemically synthesized
  source 1..20: mol_type = other DNA
ccgccctgggagatcagagt

SEQ ID NO: 60650 - DNA, 20 bp, synthetic construct
  misc_feature 1..20: note = chemically synthesized
  source 1..20: mol_type = other DNA
cctgggagatcagagtgggt

SEQ ID NO: 60651 - DNA, 20 bp, synthetic construct
  misc_feature 1..20: note = chemically synthesized
  source 1..20: mol_type = other DNA
tgggagatcagagtgggtta

SEQ ID NO: 60652 - DNA, 20 bp, synthetic construct
  misc_feature 1..20: note = chemically synthesized
  source 1..20: mol_type = other DNA
gtgggttagagcccatttga

SEQ ID NO: 60653 - DNA, 20 bp, synthetic construct
  misc_feature 1..20: note = chemically synthesized
  source 1..20: mol_type = other DNA
ttagagcccatttgacagat

SEQ ID NO: 60654 - DNA, 20 bp, synthetic construct
  misc_feature 1..20: note = chemically synthesized
  source 1..20: mol_type = other DNA
tagagcccatttgacagatg

SEQ ID NO: 60655 - DNA, 20 bp, synthetic construct
  misc_feature 1..20: note = chemically synthesized
  source 1..20: mol_type = other DNA
ccatttgacagatgaggaaa

SEQ ID NO: 60656 - DNA, 20 bp, synthetic construct
  misc_feature 1..20: note = chemically synthesized
  source 1..20: mol_type = other DNA
catttgacagatgaggaaac

SEQ ID NO: 60657 - DNA, 20 bp, synthetic construct
  misc_feature 1..20: note = chemically synthesized
  source 1..20: mol_type = other DNA
gacagatgaggaaacaggct

SEQ ID NO: 60658 - DNA, 20 bp, synthetic construct
  misc_feature 1..20: note = chemically synthesized
  source 1..20: mol_type = other DNA
cagatgaggaaacaggctca

SEQ ID NO: 60659 - DNA, 20 bp, synthetic construct
  misc_feature 1..20: note = chemically synthesized
  source 1..20: mol_type = other DNA
atgaggaaacaggctcagag

SEQ ID NO: 60660 - DNA, 20 bp, synthetic construct
  misc_feature 1..20: note = chemically synthesized
  source 1..20: mol_type = other DNA
gaggaaacaggctcagagcg

SEQ ID NO: 60661 - DNA, 20 bp, synthetic construct
  misc_feature 1..20: note = chemically synthesized
  source 1..20: mol_type = other DNA
ggaaacaggctcagagcgga

SEQ ID NO: 60662 - DNA, 20 bp, synthetic construct
  misc_feature 1..20: note = chemically synthesized
  source 1..20: mol_type = other DNA
gcggagagaccgctcatcca

SEQ ID NO: 60663 - DNA, 20 bp, synthetic construct
  misc_feature 1..20: note = chemically synthesized
  source 1..20: mol_type = other DNA
accgctcatccaaagttacc

SEQ ID NO: 60664 - DNA, 20 bp, synthetic construct
  misc_feature 1..20: note = chemically synthesized
  source 1..20: mol_type = other DNA
ctcatccaaagttacccagt

SEQ ID NO: 60665 - DNA, 20 bp, synthetic construct
  misc_feature 1..20: note = chemically synthesized
  source 1..20: mol_type = other DNA
caaagttacccagtcagcct

SEQ ID NO: 60666 - DNA, 20 bp, synthetic construct
  misc_feature 1..20: note = chemically synthesized
  source 1..20: mol_type = other DNA
agacacaaacaccctcttga

SEQ ID NO: 60667 - DNA, 20 bp, synthetic construct
  misc_feature 1..20: note = chemically synthesized
  source 1..20: mol_type = other DNA
caccctcttgatggtcccga

SEQ ID NO: 60668 - DNA, 20 bp, synthetic construct
  misc_feature 1..20: note = chemically synthesized
  source 1..20: mol_type = other DNA
tgatggtcccgatggaaaaa

SEQ ID NO: 60669 - DNA, 20 bp, synthetic construct
  misc_feature 1..20: note = chemically synthesized
  source 1..20: mol_type = other DNA
atggtcccgatggaaaaatg

SEQ ID NO: 60670 - DNA, 20 bp, synthetic construct
  misc_feature 1..20: note = chemically synthesized
  source 1..20: mol_type = other DNA
tggaaaaatggagcatgact

SEQ ID NO: 60671 - DNA, 20 bp, synthetic construct
  misc_feature 1..20: note = chemically synthesized
  source 1..20: mol_type = other DNA
ggaaaaatggagcatgactg

SEQ ID NO: 60672 - DNA, 20 bp, synthetic construct
  misc_feature 1..20: note = chemically synthesized
  source 1..20: mol_type = other DNA
aaaatggagcatgactgagg

SEQ ID NO: 60673 - DNA, 20 bp, synthetic construct
  misc_feature 1..20: note = chemically synthesized
  source 1..20: mol_type = other DNA
actgaggcagacacaaccgt

SEQ ID NO: 60674 - DNA, 20 bp, synthetic construct
  misc_feature 1..20: note = chemically synthesized
  source 1..20: mol_type = other DNA
ctgaggcagacacaaccgtc

SEQ ID NO: 60675 - DNA, 20 bp, synthetic construct
  misc_feature 1..20: note = chemically synthesized
  source 1..20: mol_type = other DNA
ggcagacacaaccgtcaggc

SEQ ID NO: 60676 - DNA, 20 bp, synthetic construct
  misc_feature 1..20: note = chemically synthesized
  source 1..20: mol_type = other DNA
acacaaccgtcaggctggca

SEQ ID NO: 60677 - DNA, 20 bp, synthetic construct
  misc_feature 1..20: note = chemically synthesized
  source 1..20: mol_type = other DNA
cacaaccgtcaggctggcat

SEQ ID NO: 60678 - DNA, 20 bp, synthetic construct
  misc_feature 1..20: note = chemically synthesized
  source 1..20: mol_type = other DNA
acaaccgtcaggctggcatg

SEQ ID NO: 60679 - DNA, 20 bp, synthetic construct
  misc_feature 1..20: note = chemically synthesized
  source 1..20: mol_type = other DNA
caaccgtcaggctggcatgg

SEQ ID NO: 60680 - DNA, 20 bp, synthetic construct
  misc_feature 1..20: note = chemically synthesized
  source 1..20: mol_type = other DNA
aaccgtcaggctggcatggg

SEQ ID NO: 60681 - DNA, 20 bp, synthetic construct
  misc_feature 1..20: note = chemically synthesized
  source 1..20: mol_type = other DNA
aggctggcatggggggccgt

SEQ ID NO: 60682 - DNA, 20 bp, synthetic construct
  misc_feature 1..20: note = chemically synthesized
  source 1..20: mol_type = other DNA
tggcatggggggccgtgaga

SEQ ID NO: 60683 - DNA, 20 bp, synthetic construct
  misc_feature 1..20: note = chemically synthesized
  source 1..20: mol_type = other DNA
ggcatggggggccgtgagac

SEQ ID NO: 60684 - DNA, 20 bp, synthetic construct
  misc_feature 1..20: note = chemically synthesized
  source 1..20: mol_type = other DNA
gcatggggggccgtgagaca

SEQ ID NO: 60685 - DNA, 20 bp, synthetic construct
  misc_feature 1..20: note = chemically synthesized
  source 1..20: mol_type = other DNA
tggggggccgtgagacaggg

SEQ ID NO: 60686 - DNA, 20 bp, synthetic construct
  misc_feature 1..20: note = chemically synthesized
  source 1..20: mol_type = other DNA
gggggccgtgagacagggta

SEQ ID NO: 60687 - DNA, 20 bp, synthetic construct
  misc_feature 1..20: note = chemically synthesized
  source 1..20: mol_type = other DNA
ggggccgtgagacagggtag

SEQ ID NO: 60688 - DNA, 20 bp, synthetic construct
  misc_feature 1..20: note = chemically synthesized
  source 1..20: mol_type = other DNA
gccgtgagacagggtagagg

SEQ ID NO: 60689 - DNA, 20 bp, synthetic construct
  misc_feature 1..20: note = chemically synthesized
  source 1..20: mol_type = other DNA
ccgtgagacagggtagaggt

SEQ ID NO: 60690 - DNA, 20 bp, synthetic construct
  misc_feature 1..20: note = chemically synthesized
  source 1..20: mol_type = other DNA
cgtgagacagggtagaggtg

SEQ ID NO: 60691 - DNA, 20 bp, synthetic construct
  misc_feature 1..20: note = chemically synthesized
  source 1..20: mol_type = other DNA
gagacagggtagaggtgggg

SEQ ID NO: 60692 - DNA, 20 bp, synthetic construct
  misc_feature 1..20: note = chemically synthesized
  source 1..20: mol_type = other DNA
ggtggggaagcacatctgta

SEQ ID NO: 60693 - DNA, 20 bp, synthetic construct
  misc_feature 1..20: note = chemically synthesized
  source 1..20: mol_type = other DNA
ggggaagcacatctgtaaag

SEQ ID NO: 60694 - DNA, 20 bp, synthetic construct
  misc_feature 1..20: note = chemically synthesized
  source 1..20: mol_type = other DNA
ggaagcacatctgtaaagaa

SEQ ID NO: 60695 - DNA, 20 bp, synthetic construct
  misc_feature 1..20: note = chemically synthesized
  source 1..20: mol_type = other DNA
aaagaagagctgtgctgcct

SEQ ID NO: 60696 - DNA, 20 bp, synthetic construct
  misc_feature 1..20: note = chemically synthesized
  source 1..20: mol_type = other DNA
aagaagagctgtgctgcctc

SEQ ID NO: 60697 - DNA, 20 bp, synthetic construct
  misc_feature 1..20: note = chemically synthesized
  source 1..20: mol_type = other DNA
aagagctgtgctgcctcagg

SEQ ID NO: 60698 - DNA, 20 bp, synthetic construct
  misc_feature 1..20: note = chemically synthesized
  source 1..20: mol_type = other DNA
agagctgtgctgcctcaggc

SEQ ID NO: 60699 - DNA, 20 bp, synthetic construct
  misc_feature 1..20: note = chemically synthesized
  source 1..20: mol_type = other DNA
gccgcttcacctctctgaac

SEQ ID NO: 60700 - DNA, 20 bp, synthetic construct
  misc_feature 1..20: note = chemically synthesized
  source 1..20: mol_type = other DNA
ccgcttcacctctctgaacc

SEQ ID NO: 60701 - DNA, 20 bp, synthetic construct
  misc_feature 1..20: note = chemically synthesized
  source 1..20: mol_type = other DNA
actgtttcacctgcatccca

SEQ ID NO: 60702 - DNA, 20 bp, synthetic construct
  misc_feature 1..20: note = chemically synthesized
  source 1..20: mol_type = other DNA
tgtttcacctgcatcccaaa

SEQ ID NO: 60703 - DNA, 20 bp, synthetic construct
  misc_feature 1..20: note = chemically synthesized
  source 1..20: mol_type = other DNA
tcacctgcatcccaaagagt

SEQ ID NO: 60704 - DNA, 20 bp, synthetic construct
  misc_feature 1..20: note = chemically synthesized
  source 1..20: mol_type = other DNA
cctgcatcccaaagagttgg

SEQ ID NO: 60705 - DNA, 20 bp, synthetic construct
  misc_feature 1..20: note = chemically synthesized
  source 1..20: mol_type = other DNA
gagttggaagtttcattccc

SEQ ID NO: 60706 - DNA, 20 bp, synthetic construct
  misc_feature 1..20: note = chemically synthesized
  source 1..20: mol_type = other DNA
cattcccaagcatgcttgtg

SEQ ID NO: 60707 - DNA, 20 bp, synthetic construct
  misc_feature 1..20: note = chemically synthesized
  source 1..20: mol_type = other DNA
agcatgcttgtgaagtgcct

SEQ ID NO: 60708 - DNA, 20 bp, synthetic construct
  misc_feature 1..20: note = chemically synthesized
  source 1..20: mol_type = other DNA
gcatgcttgtgaagtgcctc

SEQ ID NO: 60709 - DNA, 20 bp, synthetic construct
  misc_feature 1..20: note = chemically synthesized
  source 1..20: mol_type = other DNA
cttgtgaagtgcctcgggtg

SEQ ID NO: 60710 - DNA, 20 bp, synthetic construct
  misc_feature 1..20: note = chemically synthesized
  source 1..20: mol_type = other DNA
agtgcctcgggtgaagtgcc

SEQ ID NO: 60711 - DNA, 20 bp, synthetic construct
  misc_feature 1..20: note = chemically synthesized
  source 1..20: mol_type = other DNA
cgggtgaagtgcctggcaca

SEQ ID NO: 60712 - DNA, 20 bp, synthetic construct
  misc_feature 1..20: note = chemically synthesized
  source 1..20: mol_type = other DNA
gtgaagtgcctggcacacag

SEQ ID NO: 60713 - DNA, 20 bp, synthetic construct
  misc_feature 1..20: note = chemically synthesized
  source 1..20: mol_type = other DNA
tgaagtgcctggcacacagt

SEQ ID NO: 60714 - DNA, 20 bp, synthetic construct
  misc_feature 1..20: note = chemically synthesized
  source 1..20: mol_type = other DNA
cacacagtaggctctttatg

SEQ ID NO: 60715 - DNA, 20 bp, synthetic construct
  misc_feature 1..20: note = chemically synthesized
  source 1..20: mol_type = other DNA
acacagtaggctctttatgt

SEQ ID NO: 60716 - DNA, 20 bp, synthetic construct
  misc_feature 1..20: note = chemically synthesized
  source 1..20: mol_type = other DNA
gctctttatgtgggtctgca

SEQ ID NO: 60717 - DNA, 20 bp, synthetic construct
  misc_feature 1..20: note = chemically synthesized
  source 1..20: mol_type = other DNA
ggtctgcacagccctctgct

SEQ ID NO: 60718 - DNA, 20 bp, synthetic construct
  misc_feature 1..20: note = chemically synthesized
  source 1..20: mol_type = other DNA
cctctgcttagtctgccccc

SEQ ID NO: 60719 - DNA, 20 bp, synthetic construct
  misc_feature 1..20: note = chemically synthesized
  source 1..20: mol_type = other DNA
ctctgcttagtctgcccccc

SEQ ID NO: 60720 - DNA, 20 bp, synthetic construct
  misc_feature 1..20: note = chemically synthesized
  source 1..20: mol_type = other DNA
agtctgccccccaggctgct

SEQ ID NO: 60721 - DNA, 20 bp, synthetic construct
  misc_feature 1..20: note = chemically synthesized
  source 1..20: mol_type = other DNA
tctgccccccaggctgctca

SEQ ID NO: 60722 - DNA, 20 bp, synthetic construct
  misc_feature 1..20: note = chemically synthesized
  source 1..20: mol_type = other DNA
gccccccaggctgctcagag

SEQ ID NO: 60723 - DNA, 20 bp, synthetic construct
  misc_feature 1..20: note = chemically synthesized
  source 1..20: mol_type = other DNA
ccccccaggctgctcagagc

SEQ ID NO: 60724 - DNA, 20 bp, synthetic construct
  misc_feature 1..20: note = chemically synthesized
  source 1..20: mol_type = other DNA
ccccaggctgctcagagcag

SEQ ID NO: 60725 - DNA, 20 bp, synthetic construct
  misc_feature 1..20: note = chemically synthesized
  source 1..20: mol_type = other DNA
cccaggctgctcagagcagg

SEQ ID NO: 60726 - DNA, 20 bp, synthetic construct
  misc_feature 1..20: note = chemically synthesized
  source 1..20: mol_type = other DNA
caggctgctcagagcaggag

SEQ ID NO: 60727 - DNA, 20 bp, synthetic construct
  misc_feature 1..20: note = chemically synthesized
  source 1..20: mol_type = other DNA
aggctgctcagagcaggagg

SEQ ID NO: 60728 - DNA, 20 bp, synthetic construct
  misc_feature 1..20: note = chemically synthesized
  source 1..20: mol_type = other DNA
ggaggaggttcaattttgac

SEQ ID NO: 60729 - DNA, 20 bp, synthetic construct
  misc_feature 1..20: note = chemically synthesized
  source 1..20: mol_type = other DNA
ggttcaattttgaccagcct

SEQ ID NO: 60730 - DNA, 20 bp, synthetic construct
  misc_feature 1..20: note = chemically synthesized
  source 1..20: mol_type = other DNA
gttcaattttgaccagcctc

SEQ ID NO: 60731 - DNA, 20 bp, synthetic construct
  misc_feature 1..20: note = chemically synthesized
  source 1..20: mol_type = other DNA
cctgtttctgtttttgctcc

SEQ ID NO: 60732 - DNA, 20 bp, synthetic construct
  misc_feature 1..20: note = chemically synthesized
  source 1..20: mol_type = other DNA
tgtttttgctcctggaaaac

SEQ ID NO: 60733 - DNA, 20 bp, synthetic construct
  misc_feature 1..20: note = chemically synthesized
  source 1..20: mol_type = other DNA
aaaccagtgtgatccgtata

SEQ ID NO: 60734 - DNA, 20 bp, synthetic construct
  misc_feature 1..20: note = chemically synthesized
  source 1..20: mol_type = other DNA
agtgtgatccgtatacagct

SEQ ID NO: 60735 - DNA, 20 bp, synthetic construct
  misc_feature 1..20: note = chemically synthesized
  source 1..20: mol_type = other DNA
tgtgatccgtatacagcttg

SEQ ID NO: 60736 - DNA, 20 bp, synthetic construct
  misc_feature 1..20: note = chemically synthesized
  source 1..20: mol_type = other DNA
tatacagcttggagtttctt

SEQ ID NO: 60737 - DNA, 20 bp, synthetic construct
  misc_feature 1..20: note = chemically synthesized
  source 1..20: mol_type = other DNA
ttggagtttctttggataca

SEQ ID NO: 60738 - DNA, 20 bp, synthetic construct
  misc_feature 1..20: note = chemically synthesized
  source 1..20: mol_type = other DNA
tggatacatggcccccactc

SEQ ID NO: 60739 - DNA, 20 bp, synthetic construct
  misc_feature 1..20: note = chemically synthesized
  source 1..20: mol_type = other DNA
ggatacatggcccccactct

SEQ ID NO: 60740 - DNA, 20 bp, synthetic construct
  misc_feature 1..20: note = chemically synthesized
  source 1..20: mol_type = other DNA
gatacatggcccccactctg

SEQ ID NO: 60741 - DNA, 20 bp, synthetic construct
  misc_feature 1..20: note = chemically synthesized
  source 1..20: mol_type = other DNA
ggcccccactctggggttgt

SEQ ID NO: 60742 - DNA, 20 bp, synthetic construct
  misc_feature 1..20: note = chemically synthesized
  source 1..20: mol_type = other DNA
cccccactctggggttgttg

SEQ ID NO: 60743 - DNA, 20 bp, synthetic construct
  misc_feature 1..20: note = chemically synthesized
  source 1..20: mol_type = other DNA
ccccactctggggttgttgg

SEQ ID NO: 60744 - DNA, 20 bp, synthetic construct
  misc_feature 1..20: note = chemically synthesized
  source 1..20: mol_type = other DNA
ctggggttgttggaggcctt

SEQ ID NO: 60745 - DNA, 20 bp, synthetic construct
  misc_feature 1..20: note = chemically synthesized
  source 1..20: mol_type = other DNA
ggggttgttggaggcctttg

SEQ ID NO: 60746 - DNA, 20 bp, synthetic construct
  misc_feature 1..20: note = chemically synthesized
  source 1..20: mol_type = other DNA
tggaggcctttggagactgc

SEQ ID NO: 60747 - DNA, 20 bp, synthetic construct
  misc_feature 1..20: note = chemically synthesized
  source 1..20: mol_type = other DNA
ggaggcctttggagactgct

SEQ ID NO: 60748 - DNA, 20 bp, synthetic construct
  misc_feature 1..20: note = chemically synthesized
  source 1..20: mol_type = other DNA
gaggcctttggagactgctg

SEQ ID NO: 60749 - DNA, 20 bp, synthetic construct
  misc_feature 1..20: note = chemically synthesized
  source 1..20: mol_type = other DNA
aggcctttggagactgctgg

SEQ ID NO: 60750 - DNA, 20 bp, synthetic construct
  misc_feature 1..20: note = chemically synthesized
  source 1..20: mol_type = other DNA
cctttggagactgctggggg

SEQ ID NO: 60751 - DNA, 20 bp, synthetic construct
  misc_feature 1..20: note = chemically synthesized
  source 1..20: mol_type = other DNA
tttggagactgctgggggtg

SEQ ID NO: 60752 - DNA, 20 bp, synthetic construct
  misc_feature 1..20: note = chemically synthesized
  source 1..20: mol_type = other DNA
ttggagactgctgggggtgg

SEQ ID NO: 60753 - DNA, 20 bp, synthetic construct
  misc_feature 1..20: note = chemically synthesized
  source 1..20: mol_type = other DNA
tggagactgctgggggtgga

SEQ ID NO: 60754 - DNA, 20 bp, synthetic construct
  misc_feature 1..20: note = chemically synthesized
  source 1..20: mol_type = other DNA
ggagactgctgggggtggag

SEQ ID NO: 60755 - DNA, 20 bp, synthetic construct
  misc_feature 1..20: note = chemically synthesized
  source 1..20: mol_type = other DNA
agactgctgggggtggaggg

SEQ ID NO: 60756 - DNA, 20 bp, synthetic construct
  misc_feature 1..20: note = chemically synthesized
  source 1..20: mol_type = other DNA
gactgctgggggtggagggg

SEQ ID NO: 60757 - DNA, 20 bp, synthetic construct
  misc_feature 1..20: note = chemically synthesized
  source 1..20: mol_type = other DNA
actgctgggggtggagggga

SEQ ID NO: 60758 - DNA, 20 bp, synthetic construct
  misc_feature 1..20: note = chemically synthesized
  source 1..20: mol_type = other DNA
ctgctgggggtggaggggag

SEQ ID NO: 60759 - DNA, 20 bp, synthetic construct
  misc_feature 1..20: note = chemically synthesized
  source 1..20: mol_type = other DNA
gctgggggtggaggggaggg

SEQ ID NO: 60760 - DNA, 20 bp, synthetic construct
  misc_feature 1..20: note = chemically synthesized
  source 1..20: mol_type = other DNA
ctgggggtggaggggagggg

SEQ ID NO: 60761 - DNA, 20 bp, synthetic construct
  misc_feature 1..20: note = chemically synthesized
  source 1..20: mol_type = other DNA
ggtggaggggaggggaggta

SEQ ID NO: 60762 - DNA, 20 bp, synthetic construct
  misc_feature 1..20: note = chemically synthesized
  source 1..20: mol_type = other DNA
gtggaggggaggggaggtac

SEQ ID NO: 60763 - DNA, 20 bp, synthetic construct
  misc_feature 1..20: note = chemically synthesized
  source 1..20: mol_type = other DNA
tggaggggaggggaggtaca

SEQ ID NO: 60764 - DNA, 20 bp, synthetic construct
  misc_feature 1..20: note = chemically synthesized
  source 1..20: mol_type = other DNA
gggaggggaggtacagggtt

SEQ ID NO: 60765 - DNA, 20 bp, synthetic construct
  misc_feature 1..20: note = chemically synthesized
  source 1..20: mol_type = other DNA
ggaggggaggtacagggttg

SEQ ID NO: 60766 - DNA, 20 bp, synthetic construct
  misc_feature 1..20: note = chemically synthesized
  source 1..20: mol_type = other DNA
gggaggtacagggttgaggc

SEQ ID NO: 60767 - DNA, 20 bp, synthetic construct
  misc_feature 1..20: note = chemically synthesized
  source 1..20: mol_type = other DNA
aggtacagggttgaggctag

SEQ ID NO: 60768 - DNA, 20 bp, synthetic construct
  misc_feature 1..20: note = chemically synthesized
  source 1..20: mol_type = other DNA
ggtacagggttgaggctagt

SEQ ID NO: 60769 - DNA, 20 bp, synthetic construct
  misc_feature 1..20: note = chemically synthesized
  source 1..20: mol_type = other DNA
gtacagggttgaggctagtg

SEQ ID NO: 60770 - DNA, 20 bp, synthetic construct
  misc_feature 1..20: note = chemically synthesized
  source 1..20: mol_type = other DNA
cttgattgcaatccctttaa

SEQ ID NO: 60771 - DNA, 20 bp, synthetic construct
  misc_feature 1..20: note = chemically synthesized
  source 1..20: mol_type = other DNA
atccctttaaaagcctaaat

SEQ ID NO: 60772 - DNA, 20 bp, synthetic construct
  misc_feature 1..20: note = chemically synthesized
  source 1..20: mol_type = other DNA
gtgcaacccgcaaacctgct

SEQ ID NO: 60773 - DNA, 20 bp, synthetic construct
  misc_feature 1..20: note = chemically synthesized
  source 1..20: mol_type = other DNA
tgcaacccgcaaacctgctt

SEQ ID NO: 60774 - DNA, 20 bp, synthetic construct
  misc_feature 1..20: note = chemically synthesized
  source 1..20: mol_type = other DNA
caacccgcaaacctgcttgg

SEQ ID NO: 60775 - DNA, 20 bp, synthetic construct
  misc_feature 1..20: note = chemically synthesized
  source 1..20: mol_type = other DNA
ccgcaaacctgcttgggagc

SEQ ID NO: 60776 - DNA, 20 bp, synthetic construct
  misc_feature 1..20: note = chemically synthesized
  source 1..20: mol_type = other DNA
gggagctggcgtacgtgccg

SEQ ID NO: 60777 - DNA, 20 bp, synthetic construct
  misc_feature 1..20: note = chemically synthesized
  source 1..20: mol_type = other DNA
gtacgtgccgtagatacttg

SEQ ID NO: 60778 - DNA, 20 bp, synthetic construct
  misc_feature 1..20: note = chemically synthesized
  source 1..20: mol_type = other DNA
acgtgccgtagatacttgca

SEQ ID NO: 60779 - DNA, 20 bp, synthetic construct
  misc_feature 1..20: note = chemically synthesized
  source 1..20: mol_type = other DNA
gtagatacttgcagagtgaa

SEQ ID NO: 60780 - DNA, 20 bp, synthetic construct
  misc_feature 1..20: note = chemically synthesized
  source 1..20: mol_type = other DNA
tacttgcagagtgaatggat

SEQ ID NO: 60781 - DNA, 20 bp, synthetic construct
  misc_feature 1..20: note = chemically synthesized
  source 1..20: mol_type = other DNA
ttgccccttctgtcattcac

SEQ ID NO: 60782 - DNA, 20 bp, synthetic construct
  misc_feature 1..20: note = chemically synthesized
  source 1..20: mol_type = other DNA
tcccatttatgcctccacct

SEQ ID NO: 60783 - DNA, 20 bp, synthetic construct
  misc_feature 1..20: note = chemically synthesized
  source 1..20: mol_type = other DNA
cccatttatgcctccacctt

SEQ ID NO: 60784 - DNA, 20 bp, synthetic construct
  misc_feature 1..20: note = chemically synthesized
  source 1..20: mol_type = other DNA
ccatttatgcctccaccttg

SEQ ID NO: 60785 - DNA, 20 bp, synthetic construct
  misc_feature 1..20: note = chemically synthesized
  source 1..20: mol_type = other DNA
cctccaccttggggctctac

SEQ ID NO: 60786 - DNA, 20 bp, synthetic construct
  misc_feature 1..20: note = chemically synthesized
  source 1..20: mol_type = other DNA
ctccaccttggggctctacc

SEQ ID NO: 60787 - DNA, 20 bp, synthetic construct
  misc_feature 1..20: note = chemically synthesized
  source 1..20: mol_type = other DNA
accttggggctctaccaggc

SEQ ID NO: 60788 - DNA, 20 bp, synthetic construct
  misc_feature 1..20: note = chemically synthesized
  source 1..20: mol_type = other DNA
tctaccaggcgagtgaccca

SEQ ID NO: 60789 - DNA, 20 bp, synthetic construct
  misc_feature 1..20: note = chemically synthesized
  source 1..20: mol_type = other DNA
ctaccaggcgagtgacccac

SEQ ID NO: 60790 - DNA, 20 bp, synthetic construct
  misc_feature 1..20: note = chemically synthesized
  source 1..20: mol_type = other DNA
gagtgacccacaggatcctc

SEQ ID NO: 60791 - DNA, 20 bp, synthetic construct
  misc_feature 1..20: note = chemically synthesized
  source 1..20: mol_type = other DNA
gatcctccagcacacacatt

SEQ ID NO: 60792 - DNA, 20 bp, synthetic construct
  misc_feature 1..20: note = chemically synthesized
  source 1..20: mol_type = other DNA
tccagcacacacattcagac

SEQ ID NO: 60793 - DNA, 20 bp, synthetic construct
  misc_feature 1..20: note = chemically synthesized
  source 1..20: mol_type = other DNA
ccagcacacacattcagacc

SEQ ID NO: 60794 - DNA, 20 bp, synthetic construct
  misc_feature 1..20: note = chemically synthesized
  source 1..20: mol_type = other DNA
cagcacacacattcagacca

SEQ ID NO: 60795 - DNA, 20 bp, synthetic construct
  misc_feature 1..20: note = chemically synthesized
  source 1..20: mol_type = other DNA
agaccagggaacccacttac

SEQ ID NO: 60796 - DNA, 20 bp, synthetic construct
  misc_feature 1..20: note = chemically synthesized
  source 1..20: mol_type = other DNA
ggaacccacttactggctgt

SEQ ID NO: 60797 - DNA, 20 bp, synthetic construct
  misc_feature 1..20: note = chemically synthesized
  source 1..20: mol_type = other DNA
gaacccacttactggctgtg

SEQ ID NO: 60798 - DNA, 20 bp, synthetic construct
  misc_feature 1..20: note = chemically synthesized
  source 1..20: mol_type = other DNA
acttactggctgtgaggcct

SEQ ID NO: 60799 - DNA, 20 bp, synthetic construct
  misc_feature 1..20: note = chemically synthesized
  source 1..20: mol_type = other DNA
cttactggctgtgaggcctc

SEQ ID NO: 60800 - DNA, 20 bp, synthetic construct
  misc_feature 1..20: note = chemically synthesized
  source 1..20: mol_type = other DNA
ctggctgtgaggcctcaggt

SEQ ID NO: 60801 - DNA, 20 bp, synthetic construct
  misc_feature 1..20: note = chemically synthesized
  source 1..20: mol_type = other DNA
gtgagttgtttaaccgctcc

SEQ ID NO: 60802 - DNA, 20 bp, synthetic construct
  misc_feature 1..20: note = chemically synthesized
  source 1..20: mol_type = other DNA
caatttccctatctgtaaaa

SEQ ID NO: 60803 - DNA, 20 bp, synthetic construct
  misc_feature 1..20: note = chemically synthesized
  source 1..20: mol_type = other DNA
aatttccctatctgtaaaat

SEQ ID NO: 60804 - DNA, 20 bp, synthetic construct
  misc_feature 1..20: note = chemically synthesized
  source 1..20: mol_type = other DNA
atttccctatctgtaaaatg

SEQ ID NO: 60805 - DNA, 20 bp, synthetic construct
  misc_feature 1..20: note = chemically synthesized
  source 1..20: mol_type = other DNA
ccctatctgtaaaatgggga

SEQ ID NO: 60806 - DNA, 20 bp, synthetic construct
  misc_feature 1..20: note = chemically synthesized
  source 1..20: mol_type = other DNA
ctgtaaaatggggatggtga

SEQ ID NO: 60807 - DNA, 20 bp, synthetic construct
  misc_feature 1..20: note = chemically synthesized
  source 1..20: mol_type = other DNA
gtgacggtatgtaccttgtt

SEQ ID NO: 60808 - DNA, 20 bp, synthetic construct
  misc_feature 1..20: note = chemically synthesized
  source 1..20: mol_type = other DNA
gtaccttgttgagctgctgt

SEQ ID NO: 60809 - DNA, 20 bp, synthetic construct
  misc_feature 1..20: note = chemically synthesized
  source 1..20: mol_type = other DNA
taccttgttgagctgctgtg

SEQ ID NO: 60810 - DNA, 20 bp, synthetic construct
  misc_feature 1..20: note = chemically synthesized
  source 1..20: mol_type = other DNA
ctgtgaggattaaaatgcaa

SEQ ID NO: 60811 - DNA, 20 bp, synthetic construct
  misc_feature 1..20: note = chemically synthesized
  source 1..20: mol_type = other DNA
ggattaaaatgcaacagttc

SEQ ID NO: 60812 - DNA, 20 bp, synthetic construct
  misc_feature 1..20: note = chemically synthesized
  source 1..20: mol_type = other DNA
gattaaaatgcaacagttca

SEQ ID NO: 60813 - DNA, 20 bp, synthetic construct
  misc_feature 1..20: note = chemically synthesized
  source 1..20: mol_type = other DNA
aaaatgcaacagttcaagga

SEQ ID NO: 60814 - DNA, 20 bp, synthetic construct
  misc_feature 1..20: note = chemically synthesized
  source 1..20: mol_type = other DNA
gcaacagttcaaggaaagct

SEQ ID NO: 60815 - DNA, 20 bp, synthetic construct
  misc_feature 1..20: note = chemically synthesized
  source 1..20: mol_type = other DNA
aacagttcaaggaaagctca

SEQ ID NO: 60816 - DNA, 20 bp, synthetic construct
  misc_feature 1..20: note = chemically synthesized
  source 1..20: mol_type = other DNA
gttcaaggaaagctcagaga

SEQ ID NO: 60817 - DNA, 20 bp, synthetic construct
  misc_feature 1..20: note = chemically synthesized
  source 1..20: mol_type = other DNA
ttcaaggaaagctcagagac

SEQ ID NO: 60818 - DNA, 20 bp, synthetic construct
  misc_feature 1..20: note = chemically synthesized
  source 1..20: mol_type = other DNA
gaaagctcagagacgggtac

SEQ ID NO: 60819 - DNA, 20 bp, synthetic construct
  misc_feature 1..20: note = chemically synthesized
  source 1..20: mol_type = other DNA
aaagctcagagacgggtact

SEQ ID NO: 60820 - DNA, 20 bp, synthetic construct
  misc_feature 1..20: note = chemically synthesized
  source 1..20: mol_type = other DNA
agacgggtactgggtgtgcc

SEQ ID NO: 60821 - DNA, 20 bp, synthetic construct
  misc_feature 1..20: note = chemically synthesized
  source 1..20: mol_type = other DNA
gggtactgggtgtgcccaga

SEQ ID NO: 60822 - DNA, 20 bp, synthetic construct
  misc_feature 1..20: note = chemically synthesized
  source 1..20: mol_type = other DNA
ctgccctccctcccccgtgt

SEQ ID NO: 60823 - DNA, 20 bp, synthetic construct
  misc_feature 1..20: note = chemically synthesized
  source 1..20: mol_type = other DNA
tgccctccctcccccgtgtc

SEQ ID NO: 60824 - DNA, 20 bp, synthetic construct
  misc_feature 1..20: note = chemically synthesized
  source 1..20: mol_type = other DNA
gccctccctcccccgtgtca

SEQ ID NO: 60825 - DNA, 20 bp, synthetic construct
  misc_feature 1..20: note = chemically synthesized
  source 1..20: mol_type = other DNA
ccctccctcccccgtgtcag

SEQ ID NO: 60826 - DNA, 20 bp, synthetic construct
  misc_feature 1..20: note = chemically synthesized
  source 1..20: mol_type = other DNA
ccctcccccgtgtcaggggc

SEQ ID NO: 60827 - DNA, 20 bp, synthetic construct
  misc_feature 1..20: note = chemically synthesized
  source 1..20: mol_type = other DNA
gtgtcaggggctggtgtcac

SEQ ID NO: 60828 - DNA, 20 bp, synthetic construct
  misc_feature 1..20: note = chemically synthesized
  source 1..20: mol_type = other DNA
tgtcaggggctggtgtcact

SEQ ID NO: 60829 - DNA, 20 bp, synthetic construct
  misc_feature 1..20: note = chemically synthesized
  source 1..20: mol_type = other DNA
gtcaggggctggtgtcactg

SEQ ID NO: 60830 - DNA, 20 bp, synthetic construct
  misc_feature 1..20: note = chemically synthesized
  source 1..20: mol_type = other DNA
aggggctggtgtcactgggg

SEQ ID NO: 60831 - DNA, 20 bp, synthetic construct
  misc_feature 1..20: note = chemically synthesized
  source 1..20: mol_type = other DNA
ggggctggtgtcactggggt

SEQ ID NO: 60832 - DNA, 20 bp, synthetic construct
  misc_feature 1..20: note = chemically synthesized
  source 1..20: mol_type = other DNA
gggctggtgtcactggggtg

SEQ ID NO: 60833 - DNA, 20 bp, synthetic construct
  misc_feature 1..20: note = chemically synthesized
  source 1..20: mol_type = other DNA
ctggtgtcactggggtgggg

SEQ ID NO: 60834 - DNA, 20 bp, synthetic construct
  misc_feature 1..20: note = chemically synthesized
  source 1..20: mol_type = other DNA
tggtgtcactggggtggggt

SEQ ID NO: 60835 - DNA, 20 bp, synthetic construct
  misc_feature 1..20: note = chemically synthesized
  source 1..20: mol_type = other DNA
ggtggggtgggccacacttg

SEQ ID NO: 60836 - DNA, 20 bp, synthetic construct
  misc_feature 1..20: note = chemically synthesized
  source 1..20: mol_type = other DNA
tggggtgggccacacttgaa

SEQ ID NO: 60837 - DNA, 20 bp, synthetic construct
  misc_feature 1..20: note = chemically synthesized
  source 1..20: mol_type = other DNA
acacttgaagagctttcctc

SEQ ID NO: 60838 - DNA, 20 bp, synthetic construct
  misc_feature 1..20: note = chemically synthesized
  source 1..20: mol_type = other DNA
cacttgaagagctttcctcc

SEQ ID NO: 60839 - DNA, 20 bp, synthetic construct
  misc_feature 1..20: note = chemically synthesized
  source 1..20: mol_type = other DNA
ttgaagagctttcctccagg

SEQ ID NO: 60840 - DNA, 20 bp, synthetic construct
  misc_feature 1..20: note = chemically synthesized
  source 1..20: mol_type = other DNA
cctccaggcagtctctcatt

SEQ ID NO: 60841 - DNA, 20 bp, synthetic construct
  misc_feature 1..20: note = chemically synthesized
  source 1..20: mol_type = other DNA
tctcattcagttaccctgtg

SEQ ID NO: 60842 - DNA, 20 bp, synthetic construct
  misc_feature 1..20: note = chemically synthesized
  source 1..20: mol_type = other DNA
ctcattcagttaccctgtga

SEQ ID NO: 60843 - DNA, 20 bp, synthetic construct
  misc_feature 1..20: note = chemically synthesized
  source 1..20: mol_type = other DNA
tcattcagttaccctgtgaa

SEQ ID NO: 60844 - DNA, 20 bp, synthetic construct
  misc_feature 1..20: note = chemically synthesized
  source 1..20: mol_type = other DNA
attcagttaccctgtgaagg

SEQ ID NO: 60845 - DNA, 20 bp, synthetic construct
  misc_feature 1..20: note = chemically synthesized
  source 1..20: mol_type = other DNA
cagttaccctgtgaagggag

SEQ ID NO: 60846 - DNA, 20 bp, synthetic construct
  misc_feature 1..20: note = chemically synthesized
  source 1..20: mol_type = other DNA
agttaccctgtgaagggagt

SEQ ID NO: 60847 - DNA, 20 bp, synthetic construct
  misc_feature 1..20: note = chemically synthesized
  source 1..20: mol_type = other DNA
agtaggtaccaccctccttt

SEQ ID NO: 60848 - DNA, 20 bp, synthetic construct
  misc_feature 1..20: note = chemically synthesized
  source 1..20: mol_type = other DNA
gtaggtaccaccctcctttc

SEQ ID NO: 60849 - DNA, 20 bp, synthetic construct
  misc_feature 1..20: note = chemically synthesized
  source 1..20: mol_type = other DNA
ggtaccaccctcctttcagg

SEQ ID NO: 60850 - DNA, 20 bp, synthetic construct
  misc_feature 1..20: note = chemically synthesized
  source 1..20: mol_type = other DNA
accaccctcctttcaggcag

SEQ ID NO: 60851 - DNA, 20 bp, synthetic construct
  misc_feature 1..20: note = chemically synthesized
  source 1..20: mol_type = other DNA
ccaccctcctttcaggcagc

SEQ ID NO: 60852 - DNA, 20 bp, synthetic construct
  misc_feature 1..20: note = chemically synthesized
  source 1..20: mol_type = other DNA
ctttcaggcagcgggaaact

SEQ ID NO: 60853 - DNA, 20 bp, synthetic construct
  misc_feature 1..20: note = chemically synthesized
  source 1..20: mol_type = other DNA
aggcagcgggaaactgagct

SEQ ID NO: 60854 - DNA, 20 bp, synthetic construct
  misc_feature 1..20: note = chemically synthesized
  source 1..20: mol_type = other DNA
actcccctccccttctctct

SEQ ID NO: 60855 - DNA, 20 bp, synthetic construct
  misc_feature 1..20: note = chemically synthesized
  source 1..20: mol_type = other DNA
tctctgagctcccttccctg

SEQ ID NO: 60856 - DNA, 20 bp, synthetic construct
  misc_feature 1..20: note = chemically synthesized
  source 1..20: mol_type = other DNA
ttccctgcagctccatcccc

SEQ ID NO: 60857 - DNA, 20 bp, synthetic construct
  misc_feature 1..20: note = chemically synthesized
  source 1..20: mol_type = other DNA
gcagctccatcccctggctt

SEQ ID NO: 60858 - DNA, 20 bp, synthetic construct
  misc_feature 1..20: note = chemically synthesized
  source 1..20: mol_type = other DNA
cagctccatcccctggcttc

SEQ ID NO: 60859 - DNA, 20 bp, synthetic construct
  misc_feature 1..20: note = chemically synthesized
  source 1..20: mol_type = other DNA
agctccatcccctggcttca

SEQ ID NO: 60860 - DNA, 20 bp, synthetic construct
  misc_feature 1..20: note = chemically synthesized
  source 1..20: mol_type = other DNA
agggcccctgtccttcccct

SEQ ID NO: 60861 - DNA, 20 bp, synthetic construct
  misc_feature 1..20: note = chemically synthesized
  source 1..20: mol_type = other DNA
cccctgtccttcccctgagc

SEQ ID NO: 60862 - DNA, 20 bp, synthetic construct
  misc_feature 1..20: note = chemically synthesized
  source 1..20: mol_type = other DNA
cttcccctgagctggctgaa

SEQ ID NO: 60863 - DNA, 20 bp, synthetic construct
  misc_feature 1..20: note = chemically synthesized
  source 1..20: mol_type = other DNA
cgctgctctacatccactca

SEQ ID NO: 60864 - DNA, 20 bp, synthetic construct
  misc_feature 1..20: note = chemically synthesized
  source 1..20: mol_type = other DNA
tctacatccactcacagctc

SEQ ID NO: 60865 - DNA, 20 bp, synthetic construct
  misc_feature 1..20: note = chemically synthesized
  source 1..20: mol_type = other DNA
tccactcacagctccagcac

SEQ ID NO: 60866 - DNA, 20 bp, synthetic construct
  misc_feature 1..20: note = chemically synthesized
  source 1..20: mol_type = other DNA
ccactcacagctccagcact

SEQ ID NO: 60867 - DNA, 20 bp, synthetic construct
  misc_feature 1..20: note = chemically synthesized
  source 1..20: mol_type = other DNA
acagctccagcactgggctg

SEQ ID NO: 60868 - DNA, 20 bp, synthetic construct
  misc_feature 1..20: note = chemically synthesized
  source 1..20: mol_type = other DNA
tccagcactgggctgtggtt

SEQ ID NO: 60869 - DNA, 20 bp, synthetic construct
  misc_feature 1..20: note = chemically synthesized
  source 1..20: mol_type = other DNA
ccagcactgggctgtggttg

SEQ ID NO: 60870 - DNA, 20 bp, synthetic construct
  misc_feature 1..20: note = chemically synthesized
  source 1..20: mol_type = other DNA
tggttgaggtcgcctgccct

SEQ ID NO: 60871 - DNA, 20 bp, synthetic construct
  misc_feature 1..20: note = chemically synthesized
  source 1..20: mol_type = other DNA
ttgaggtcgcctgccctcgg

SEQ ID NO: 60872 - DNA, 20 bp, synthetic construct
  misc_feature 1..20: note = chemically synthesized
  source 1..20: mol_type = other DNA
cgcctgccctcggtagctcc

SEQ ID NO: 60873 - DNA, 20 bp, synthetic construct
  misc_feature 1..20: note = chemically synthesized
  source 1..20: mol_type = other DNA
gcctgccctcggtagctcct

SEQ ID NO: 60874 - DNA, 20 bp, synthetic construct
  misc_feature 1..20: note = chemically synthesized
  source 1..20: mol_type = other DNA
tgggcatttcttcccctctc

SEQ ID NO: 60875 - DNA, 20 bp, synthetic construct
  misc_feature 1..20: note = chemically synthesized
  source 1..20: mol_type = other DNA
gggcatttcttcccctctct

SEQ ID NO: 60876 - DNA, 20 bp, synthetic construct
  misc_feature 1..20: note = chemically synthesized
  source 1..20: mol_type = other DNA
tgcacaatgacccccactct

SEQ ID NO: 60877 - DNA, 20 bp, synthetic construct
  misc_feature 1..20: note = chemically synthesized
  source 1..20: mol_type = other DNA
cctgctgtccctcccacctg

SEQ ID NO: 60878 - DNA, 20 bp, synthetic construct
  misc_feature 1..20: note = chemically synthesized
  source 1..20: mol_type = other DNA
tccctcccacctgtggaact

SEQ ID NO: 60879 - DNA, 20 bp, synthetic construct
  misc_feature 1..20: note = chemically synthesized
  source 1..20: mol_type = other DNA
tcccacctgtggaactgagt

SEQ ID NO: 60880 - DNA, 20 bp, synthetic construct
  misc_feature 1..20: note = chemically synthesized
  source 1..20: mol_type = other DNA
cacctgtggaactgagtgag

SEQ ID NO: 60881 - DNA, 20 bp, synthetic construct
  misc_feature 1..20: note = chemically synthesized
  source 1..20: mol_type = other DNA
ctgtggaactgagtgagcag

SEQ ID NO: 60882 - DNA, 20 bp, synthetic construct
  misc_feature 1..20: note = chemically synthesized
  source 1..20: mol_type = other DNA
tggaactgagtgagcagcag

SEQ ID NO: 60883 - DNA, 20 bp, synthetic construct
  misc_feature 1..20: note = chemically synthesized
  source 1..20: mol_type = other DNA
ccacctttcctgctctcctc

SEQ ID NO: 60884 - DNA, 20 bp, synthetic construct
  misc_feature 1..20: note = chemically synthesized
  source 1..20: mol_type = other DNA
gctctcctcaagctctcctc

SEQ ID NO: 60885 - DNA, 20 bp, synthetic construct
  misc_feature 1..20: note = chemically synthesized
  source 1..20: mol_type = other DNA
tcctcaagctctgtctcttc

SEQ ID NO: 60886 - DNA, 20 bp, synthetic construct
  misc_feature 1..20: note = chemically synthesized
  source 1..20: mol_type = other DNA
tcaagctctgtctcttctgg

SEQ ID NO: 60887 - DNA, 20 bp, synthetic construct
  misc_feature 1..20: note = chemically synthesized
  source 1..20: mol_type = other DNA
caagctctgtctcttctggc

SEQ ID NO: 60888 - DNA, 20 bp, synthetic construct
  misc_feature 1..20: note = chemically synthesized
  source 1..20: mol_type = other DNA
tctgtctcttctggcaggca

SEQ ID NO: 60889 - DNA, 20 bp, synthetic construct
  misc_feature 1..20: note = chemically synthesized
  source 1..20: mol_type = other DNA
ctgtctcttctggcaggcac

SEQ ID NO: 60890 - DNA, 20 bp, synthetic construct
  misc_feature 1..20: note = chemically synthesized
  source 1..20: mol_type = other DNA
gtctcttctggcaggcacag

SEQ ID NO: 60891 - DNA, 20 bp, synthetic construct
  misc_feature 1..20: note = chemically synthesized
  source 1..20: mol_type = other DNA
ctcttctggcaggcacagga

SEQ ID NO: 60892 - DNA, 20 bp, synthetic construct
  misc_feature 1..20: note = chemically synthesized
  source 1..20: mol_type = other DNA
ttctggcaggcacaggagag

SEQ ID NO: 60893 - DNA, 20 bp, synthetic construct
  misc_feature 1..20: note = chemically synthesized
  source 1..20: mol_type = other DNA
aggcacaggagagtggcctg

SEQ ID NO: 60894 - DNA, 20 bp, synthetic construct
  misc_feature 1..20: note = chemically synthesized
  source 1..20: mol_type = other DNA
ggcacaggagagtggcctga

SEQ ID NO: 60895 - DNA, 20 bp, synthetic construct
  misc_feature 1..20: note = chemically synthesized
  source 1..20: mol_type = other DNA
caggagagtggcctgaaggc

SEQ ID NO: 60896 - DNA, 20 bp, synthetic construct
  misc_feature 1..20: note = chemically synthesized
  source 1..20: mol_type = other DNA
gagagtggcctgaaggctgg

SEQ ID NO: 60897 - DNA, 20 bp, synthetic construct
  misc_feature 1..20: note = chemically synthesized
  source 1..20: mol_type = other DNA
agagtggcctgaaggctggc

SEQ ID NO: 60898 - DNA, 20 bp, synthetic construct
  misc_feature 1..20: note = chemically synthesized
  source 1..20: mol_type = other DNA
agtggcctgaaggctggcag

SEQ ID NO: 60899 - DNA, 20 bp, synthetic construct
  misc_feature 1..20: note = chemically synthesized
  source 1..20: mol_type = other DNA
gtggcctgaaggctggcagg

SEQ ID NO: 60900 - DNA, 20 bp, synthetic construct
  misc_feature 1..20: note = chemically synthesized
  source 1..20: mol_type = other DNA
aggttgccgcccctccaacc

SEQ ID NO: 60901 - DNA, 20 bp, synthetic construct
  misc_feature 1..20: note = chemically synthesized
  source 1..20: mol_type = other DNA
cccctccaacctggaattcc

SEQ ID NO: 60902 - DNA, 20 bp, synthetic construct
  misc_feature 1..20: note = chemically synthesized
  source 1..20: mol_type = other DNA
ctccaacctggaattcctgg

SEQ ID NO: 60903 - DNA, 20 bp, synthetic construct
  misc_feature 1..20: note = chemically synthesized
  source 1..20: mol_type = other DNA
caacctggaattcctggcag

SEQ ID NO: 60904 - DNA, 20 bp, synthetic construct
  misc_feature 1..20: note = chemically synthesized
  source 1..20: mol_type = other DNA
cctggaattcctggcagcag

SEQ ID NO: 60905 - DNA, 20 bp, synthetic construct
  misc_feature 1..20: note = chemically synthesized
  source 1..20: mol_type = other DNA
ggaattcctggcagcagcag

SEQ ID NO: 60906 - DNA, 20 bp, synthetic construct
  misc_feature 1..20: note = chemically synthesized
  source 1..20: mol_type = other DNA
ttcctggcagcagcagcggc

SEQ ID NO: 60907 - DNA, 20 bp, synthetic construct
  misc_feature 1..20: note = chemically synthesized
  source 1..20: mol_type = other DNA
tcctggcagcagcagcggct

SEQ ID NO: 60908 - DNA, 20 bp, synthetic construct
  misc_feature 1..20: note = chemically synthesized
  source 1..20: mol_type = other DNA
agcagcggctaggccttcct

SEQ ID NO: 60909 - DNA, 20 bp, synthetic construct
  misc_feature 1..20: note = chemically synthesized
  source 1..20: mol_type = other DNA
cagcggctaggccttcctcg

SEQ ID NO: 60910 - DNA, 20 bp, synthetic construct
  misc_feature 1..20: note = chemically synthesized
  source 1..20: mol_type = other DNA
agcggctaggccttcctcgg

SEQ ID NO: 60911 - DNA, 20 bp, synthetic construct
  misc_feature 1..20: note = chemically synthesized
  source 1..20: mol_type = other DNA
cccgaccccctcctccttct

SEQ ID NO: 60912 - DNA, 20 bp, synthetic construct
  misc_feature 1..20: note = chemically synthesized
  source 1..20: mol_type = other DNA
ccccctcctccttcttggtt

SEQ ID NO: 60913 - DNA, 20 bp, synthetic construct
  misc_feature 1..20: note = chemically synthesized
  source 1..20: mol_type = other DNA
tcctccttcttggttcagct

SEQ ID NO: 60914 - DNA, 20 bp, synthetic construct
  misc_feature 1..20: note = chemically synthesized
  source 1..20: mol_type = other DNA
cctccttcttggttcagctc

SEQ ID NO: 60915 - DNA, 20 bp, synthetic construct
  misc_feature 1..20: note = chemically synthesized
  source 1..20: mol_type = other DNA
ttggttcagctcaggactct

SEQ ID NO: 60916 - DNA, 20 bp, synthetic construct
  misc_feature 1..20: note = chemically synthesized
  source 1..20: mol_type = other DNA
tggttcagctcaggactctg

SEQ ID NO: 60917 - DNA, 20 bp, synthetic construct
  misc_feature 1..20: note = chemically synthesized
  source 1..20: mol_type = other DNA
ggttcagctcaggactctga

SEQ ID NO: 60918 - DNA, 20 bp, synthetic construct
  misc_feature 1..20: note = chemically synthesized
  source 1..20: mol_type = other DNA
ggactctgagggttgctgcg

SEQ ID NO: 60919 - DNA, 20 bp, synthetic construct
  misc_feature 1..20: note = chemically synthesized
  source 1..20: mol_type = other DNA
actctgagggttgctgcgtg

SEQ ID NO: 60920 - DNA, 20 bp, synthetic construct
  misc_feature 1..20: note = chemically synthesized
  source 1..20: mol_type = other DNA
ctctgagggttgctgcgtgg

SEQ ID NO: 60921 - DNA, 20 bp, synthetic construct
  misc_feature 1..20: note = chemically synthesized
  source 1..20: mol_type = other DNA
tgagggttgctgcgtggagg

SEQ ID NO: 60922 - DNA, 20 bp, synthetic construct
  misc_feature 1..20: note = chemically synthesized
  source 1..20: mol_type = other DNA
cgtggaggcagtgcatgccc

SEQ ID NO: 60923 - DNA, 20 bp, synthetic construct
  misc_feature 1..20: note = chemically synthesized
  source 1..20: mol_type = other DNA
gtggaggcagtgcatgccct

SEQ ID NO: 60924 - DNA, 20 bp, synthetic construct
  misc_feature 1..20: note = chemically synthesized
  source 1..20: mol_type = other DNA
ggcagtgcatgccctgggca

SEQ ID NO: 60925 - DNA, 20 bp, synthetic construct
  misc_feature 1..20: note = chemically synthesized
  source 1..20: mol_type = other DNA
catgccctgggcacagtgcc

SEQ ID NO: 60926 - DNA, 20 bp, synthetic construct
  misc_feature 1..20: note = chemically synthesized
  source 1..20: mol_type = other DNA
gtgcccagttcctgcccacc

SEQ ID NO: 60927 - DNA, 20 bp, synthetic construct
  misc_feature 1..20: note = chemically synthesized
  source 1..20: mol_type = other DNA
tgcccagttcctgcccaccc

SEQ ID NO: 60928 - DNA, 20 bp, synthetic construct
  misc_feature 1..20: note = chemically synthesized
  source 1..20: mol_type = other DNA
ccagttcctgcccacccagg

SEQ ID NO: 60929 - DNA, 20 bp, synthetic construct
  misc_feature 1..20: note = chemically synthesized
  source 1..20: mol_type = other DNA
gttcctgcccacccaggaag

SEQ ID NO: 60930 - DNA, 20 bp, synthetic construct
  misc_feature 1..20: note = chemically synthesized
  source 1..20: mol_type = other DNA
cccacccaggaagtagactt

SEQ ID NO: 60931 - DNA, 20 bp, synthetic construct
  misc_feature 1..20: note = chemically synthesized
  source 1..20: mol_type = other DNA
ccacccaggaagtagacttc

SEQ ID NO: 60932 - DNA, 20 bp, synthetic construct
  misc_feature 1..20: note = chemically synthesized
  source 1..20: mol_type = other DNA
cccaggaagtagacttcggg

SEQ ID NO: 60933 - DNA, 20 bp, synthetic construct
  misc_feature 1..20: note = chemically synthesized
  source 1..20: mol_type = other DNA
caggaagtagacttcgggtg

SEQ ID NO: 60934 - DNA, 20 bp, synthetic construct
  misc_feature 1..20: note = chemically synthesized
  source 1..20: mol_type = other DNA
aggaagtagacttcgggtgg

SEQ ID NO: 60935 - DNA, 20 bp, synthetic construct
  misc_feature 1..20: note = chemically synthesized
  source 1..20: mol_type = other DNA
aagtagacttcgggtggagg

SEQ ID NO: 60936 - DNA, 20 bp, synthetic construct
  misc_feature 1..20: note = chemically synthesized
  source 1..20: mol_type = other DNA
tagacttcgggtggaggcag

SEQ ID NO: 60937 - DNA, 20 bp, synthetic construct
  misc_feature 1..20: note = chemically synthesized
  source 1..20: mol_type = other DNA
agacttcgggtggaggcagt

SEQ ID NO: 60938 - DNA, 20 bp, synthetic construct
  misc_feature 1..20: note = chemically synthesized
  source 1..20: mol_type = other DNA
ttcgggtggaggcagtaggc

SEQ ID NO: 60939 - DNA, 20 bp, synthetic construct
  misc_feature 1..20: note = chemically synthesized
  source 1..20: mol_type = other DNA
tcgggtggaggcagtaggct

SEQ ID NO: 60940 - DNA, 20 bp, synthetic construct
  misc_feature 1..20: note = chemically synthesized
  source 1..20: mol_type = other DNA
cgggtggaggcagtaggctg

SEQ ID NO: 60941 - DNA, 20 bp, synthetic construct
  misc_feature 1..20: note = chemically synthesized
  source 1..20: mol_type = other DNA
ggtggaggcagtaggctggg

SEQ ID NO: 60942 - DNA, 20 bp, synthetic construct
  misc_feature 1..20: note = chemically synthesized
  source 1..20: mol_type = other DNA
gtggaggcagtaggctgggg

SEQ ID NO: 60943 - DNA, 20 bp, synthetic construct
  misc_feature 1..20: note = chemically synthesized
  source 1..20: mol_type = other DNA
tggaggcagtaggctgggga

SEQ ID NO: 60944 - DNA, 20 bp, synthetic construct
  misc_feature 1..20: note = chemically synthesized
  source 1..20: mol_type = other DNA
ggaggcagtaggctggggag

SEQ ID NO: 60945 - DNA, 20 bp, synthetic construct
  misc_feature 1..20: note = chemically synthesized
  source 1..20: mol_type = other DNA
ggcagtaggctggggagggg

SEQ ID NO: 60946 - DNA, 20 bp, synthetic construct
  misc_feature 1..20: note = chemically synthesized
  source 1..20: mol_type = other DNA
gcagtaggctggggaggggc

SEQ ID NO: 60947 - DNA, 20 bp, synthetic construct
  misc_feature 1..20: note = chemically synthesized
  source 1..20: mol_type = other DNA
cagtaggctggggaggggcg

SEQ ID NO: 60948 - DNA, 20 bp, synthetic construct
  misc_feature 1..20: note = chemically synthesized
  source 1..20: mol_type = other DNA
gtaggctggggaggggcggg

SEQ ID NO: 60949 - DNA, 20 bp, synthetic construct
  misc_feature 1..20: note = chemically synthesized
  source 1..20: mol_type = other DNA
ctggggaggggcggggagct

SEQ ID NO: 60950 - DNA, 20 bp, synthetic construct
  misc_feature 1..20: note = chemically synthesized
  source 1..20: mol_type = other DNA
ggaggggcggggagcttgga

SEQ ID NO: 60951 - DNA, 20 bp, synthetic construct
  misc_feature 1..20: note = chemically synthesized
  source 1..20: mol_type = other DNA
gaggggcggggagcttggac

SEQ ID NO: 60952 - DNA, 20 bp, synthetic construct
  misc_feature 1..20: note = chemically synthesized
  source 1..20: mol_type = other DNA
gggcggggagcttggacagg

SEQ ID NO: 60953 - DNA, 20 bp, synthetic construct
  misc_feature 1..20: note = chemically synthesized
  source 1..20: mol_type = other DNA
ggcggggagcttggacagga

SEQ ID NO: 60954 - DNA, 20 bp, synthetic construct
  misc_feature 1..20: note = chemically synthesized
  source 1..20: mol_type = other DNA
cggggagcttggacaggaag

SEQ ID NO: 60955 - DNA, 20 bp, synthetic construct
  misc_feature 1..20: note = chemically synthesized
  source 1..20: mol_type = other DNA
aaggagccttgctcattgcc

SEQ ID NO: 60956 - DNA, 20 bp, synthetic construct
  misc_feature 1..20: note = chemically synthesized
  source 1..20: mol_type = other DNA
gagccttgctcattgcccgg

SEQ ID NO: 60957 - DNA, 20 bp, synthetic construct
  misc_feature 1..20: note = chemically synthesized
  source 1..20: mol_type = other DNA
gctcattgcccggcagacac

SEQ ID NO: 60958 - DNA, 20 bp, synthetic construct
  misc_feature 1..20: note = chemically synthesized
  source 1..20: mol_type = other DNA
ttgcccggcagacacaagac

SEQ ID NO: 60959 - DNA, 20 bp, synthetic construct
  misc_feature 1..20: note = chemically synthesized
  source 1..20: mol_type = other DNA
tgcccggcagacacaagact

SEQ ID NO: 60960 - DNA, 20 bp, synthetic construct
  misc_feature 1..20: note = chemically synthesized
  source 1..20: mol_type = other DNA
agactgggccctcataaact

SEQ ID NO: 60961 - DNA, 20 bp, synthetic construct
  misc_feature 1..20: note = chemically synthesized
  source 1..20: mol_type = other DNA
tgggccctcataaactcaga

SEQ ID NO: 60962 - DNA, 20 bp, synthetic construct
  misc_feature 1..20: note = chemically synthesized
  source 1..20: mol_type = other DNA
cctcataaactcagacagcc

SEQ ID NO: 60963 - DNA, 20 bp, synthetic construct
  misc_feature 1..20: note = chemically synthesized
  source 1..20: mol_type = other DNA
acctgttgtacctgcccttt

SEQ ID NO: 60964 - DNA, 20 bp, synthetic construct
  misc_feature 1..20: note = chemically synthesized
  source 1..20: mol_type = other DNA
gccctttcagctctgtgacc

SEQ ID NO: 60965 - DNA, 20 bp, synthetic construct
  misc_feature 1..20: note = chemically synthesized
  source 1..20: mol_type = other DNA
ccctttcagctctgtgaccc

SEQ ID NO: 60966 - DNA, 20 bp, synthetic construct
  misc_feature 1..20: note = chemically synthesized
  source 1..20: mol_type = other DNA
tcagctctgtgacccgggac

SEQ ID NO: 60967 - DNA, 20 bp, synthetic construct
  misc_feature 1..20: note = chemically synthesized
  source 1..20: mol_type = other DNA
acaagtcaccctctcccttt

SEQ ID NO: 60968 - DNA, 20 bp, synthetic construct
  misc_feature 1..20: note = chemically synthesized
  source 1..20: mol_type = other DNA
ctctccctttgagttgccgc

SEQ ID NO: 60969 - DNA, 20 bp, synthetic construct
  misc_feature 1..20: note = chemically synthesized
  source 1..20: mol_type = other DNA
ctccctttgagttgccgcaa

SEQ ID NO: 60970 - DNA, 20 bp, synthetic construct
  misc_feature 1..20: note = chemically synthesized
  source 1..20: mol_type = other DNA
tccctttgagttgccgcaag

SEQ ID NO: 60971 - DNA, 20 bp, synthetic construct
  misc_feature 1..20: note = chemically synthesized
  source 1..20: mol_type = other DNA
ttgagttgccgcaagaggta

SEQ ID NO: 60972 - DNA, 20 bp, synthetic construct
  misc_feature 1..20: note = chemically synthesized
  source 1..20: mol_type = other DNA
agaggtacagtcacactgcc

SEQ ID NO: 60973 - DNA, 20 bp, synthetic construct
  misc_feature 1..20: note = chemically synthesized
  source 1..20: mol_type = other DNA
aggtacagtcacactgccca

SEQ ID NO: 60974 - DNA, 20 bp, synthetic construct
  misc_feature 1..20: note = chemically synthesized
  source 1..20: mol_type = other DNA
ggtacagtcacactgcccag

SEQ ID NO: 60975 - DNA, 20 bp, synthetic construct
  misc_feature 1..20: note = chemically synthesized
  source 1..20: mol_type = other DNA
cacactgcccagaggattac

SEQ ID NO: 60976 - DNA, 20 bp, synthetic construct
  misc_feature 1..20: note = chemically synthesized
  source 1..20: mol_type = other DNA
cagaggattactagaaatga

SEQ ID NO: 60977 - DNA, 20 bp, synthetic construct
  misc_feature 1..20: note = chemically synthesized
  source 1..20: mol_type = other DNA
agaggattactagaaatgac

SEQ ID NO: 60978 - DNA, 20 bp, synthetic construct
  misc_feature 1..20: note = chemically synthesized
  source 1..20: mol_type = other DNA
aatgacaggcctcgccctcc

SEQ ID NO: 60979 - DNA, 20 bp, synthetic construct
  misc_feature 1..20: note = chemically synthesized
  source 1..20: mol_type = other DNA
caggcctcgccctcctggca

SEQ ID NO: 60980 - DNA, 20 bp, synthetic construct
  misc_feature 1..20: note = chemically synthesized
  source 1..20: mol_type = other DNA
tcgccctcctggcacagacc

SEQ ID NO: 60981 - DNA, 20 bp, synthetic construct
  misc_feature 1..20: note = chemically synthesized
  source 1..20: mol_type = other DNA
acagacctggcaccaataac

SEQ ID NO: 60982 - DNA, 20 bp, synthetic construct
  misc_feature 1..20: note = chemically synthesized
  source 1..20: mol_type = other DNA
gacctggcaccaataactgg

SEQ ID NO: 60983 - DNA, 20 bp, synthetic construct
  misc_feature 1..20: note = chemically synthesized
  source 1..20: mol_type = other DNA
acctggcaccaataactggc

SEQ ID NO: 60984 - DNA, 20 bp, synthetic construct
  misc_feature 1..20: note = chemically synthesized
  source 1..20: mol_type = other DNA
accaataactggcaggtttc

SEQ ID NO: 60985 - DNA, 20 bp, synthetic construct
  misc_feature 1..20: note = chemically synthesized
  source 1..20: mol_type = other DNA
ccaataactggcaggtttct

SEQ ID NO: 60986 - DNA, 20 bp, synthetic construct
  misc_feature 1..20: note = chemically synthesized
  source 1..20: mol_type = other DNA
caataactggcaggtttctg

SEQ ID NO: 60987 - DNA, 20 bp, synthetic construct
  misc_feature 1..20: note = chemically synthesized
  source 1..20: mol_type = other DNA
aactggcaggtttctggggc

SEQ ID NO: 60988 - DNA, 20 bp, synthetic construct
  misc_feature 1..20: note = chemically synthesized
  source 1..20: mol_type = other DNA
caggtttctggggccagctg

SEQ ID NO: 60989 - DNA, 20 bp, synthetic construct
  misc_feature 1..20: note = chemically synthesized
  source 1..20: mol_type = other DNA
ggtttctggggccagctgca

SEQ ID NO: 60990 - DNA, 20 bp, synthetic construct
  misc_feature 1..20: note = chemically synthesized
  source 1..20: mol_type = other DNA
gtttctggggccagctgcag

SEQ ID NO: 60991 - DNA, 20 bp, synthetic construct
  misc_feature 1..20: note = chemically synthesized
  source 1..20: mol_type = other DNA
tttctggggccagctgcaga

SEQ ID NO: 60992 - DNA, 20 bp, synthetic construct
  misc_feature 1..20: note = chemically synthesized
  source 1..20: mol_type = other DNA
ctggggccagctgcagaggg

SEQ ID NO: 60993 - DNA, 20 bp, synthetic construct
  misc_feature 1..20: note = chemically synthesized
  source 1..20: mol_type = other DNA
ggggccagctgcagagggaa

SEQ ID NO: 60994 - DNA, 20 bp, synthetic construct
  misc_feature 1..20: note = chemically synthesized
  source 1..20: mol_type = other DNA
gggccagctgcagagggaag

SEQ ID NO: 60995 - DNA, 20 bp, synthetic construct
  misc_feature 1..20: note = chemically synthesized
  source 1..20: mol_type = other DNA
gctgcagagggaagaggact

SEQ ID NO: 60996 - DNA, 20 bp, synthetic construct
  misc_feature 1..20: note = chemically synthesized
  source 1..20: mol_type = other DNA
tgagccacctatgaaatgcc

SEQ ID NO: 60997 - DNA, 20 bp, synthetic construct
  misc_feature 1..20: note = chemically synthesized
  source 1..20: mol_type = other DNA
gccacctatgaaatgcccag

SEQ ID NO: 60998 - DNA, 20 bp, synthetic construct
  misc_feature 1..20: note = chemically synthesized
  source 1..20: mol_type = other DNA
ccacctatgaaatgcccagt

SEQ ID NO: 60999 - DNA, 20 bp, synthetic construct
  misc_feature 1..20: note = chemically synthesized
  source 1..20: mol_type = other DNA
cctatgaaatgcccagtggg

SEQ ID NO: 61000 - DNA, 20 bp, synthetic construct
  misc_feature 1..20: note = chemically synthesized
  source 1..20: mol_type = other DNA
atgcccagtgggcagcccca

SEQ ID NO: 61001 - DNA, 20 bp, synthetic construct
  misc_feature 1..20: note = chemically synthesized
  source 1..20: mol_type = other DNA
ccagtgggcagccccacagt

SEQ ID NO: 61002 - DNA, 20 bp, synthetic construct
  misc_feature 1..20: note = chemically synthesized
  source 1..20: mol_type = other DNA
cagtgggcagccccacagtt

SEQ ID NO: 61003 - DNA, 20 bp, synthetic construct
  misc_feature 1..20: note = chemically synthesized
  source 1..20: mol_type = other DNA
tgggcagccccacagttggg

SEQ ID NO: 61004 - DNA, 20 bp, synthetic construct
  misc_feature 1..20: note = chemically synthesized
  source 1..20: mol_type = other DNA
gggcagccccacagttgggc

SEQ ID NO: 61005 - DNA, 20 bp, synthetic construct
  misc_feature 1..20: note = chemically synthesized
  source 1..20: mol_type = other DNA
ttgggcaggtctgtgtgcac

SEQ ID NO: 61006 - DNA, 20 bp, synthetic construct
  misc_feature 1..20: note = chemically synthesized
  source 1..20: mol_type = other DNA
tgggcaggtctgtgtgcact

SEQ ID NO: 61007 - DNA, 20 bp, synthetic construct
  misc_feature 1..20: note = chemically synthesized
  source 1..20: mol_type = other DNA
gggcaggtctgtgtgcactg

SEQ ID NO: 61008 - DNA, 20 bp, synthetic construct
  misc_feature 1..20: note = chemically synthesized
  source 1..20: mol_type = other DNA
gcaggtctgtgtgcactggg

SEQ ID NO: 61009 - DNA, 20 bp, synthetic construct
  misc_feature 1..20: note = chemically synthesized
  source 1..20: mol_type = other DNA
caggtctgtgtgcactgggg

SEQ ID NO: 61010 - DNA, 20 bp, synthetic construct
  misc_feature 1..20: note = chemically synthesized
  source 1..20: mol_type = other DNA
cactggggaggtgtgtgtca

SEQ ID NO: 61011 - DNA, 20 bp, synthetic construct
  misc_feature 1..20: note = chemically synthesized
  source 1..20: mol_type = other DNA
actggggaggtgtgtgtcat

SEQ ID NO: 61012 - DNA, 20 bp, synthetic construct
  misc_feature 1..20: note = chemically synthesized
  source 1..20: mol_type = other DNA
gaggtgtgtgtcataggacc

SEQ ID NO: 61013 - DNA, 20 bp, synthetic construct
  misc_feature 1..20: note = chemically synthesized
  source 1..20: mol_type = other DNA
tcctatgacacacacctccc

SEQ ID NO: 61014 - DNA, 20 bp, synthetic construct
  misc_feature 1..20: note = chemically synthesized
  source 1..20: mol_type = other DNA
acacacctccccagtgcaca

SEQ ID NO: 61015 - DNA, 20 bp, synthetic construct
  misc_feature 1..20: note = chemically synthesized
  source 1..20: mol_type = other DNA
cacacagacctgcccaactg

SEQ ID NO: 61016 - DNA, 20 bp, synthetic construct
  misc_feature 1..20: note = chemically synthesized
  source 1..20: mol_type = other DNA
acacagacctgcccaactgt

SEQ ID NO: 61017 - DNA, 20 bp, synthetic construct
  misc_feature 1..20: note = chemically synthesized
  source 1..20: mol_type = other DNA
cacagacctgcccaactgtg

SEQ ID NO: 61018 - DNA, 20 bp, synthetic construct
  misc_feature 1..20: note = chemically synthesized
  source 1..20: mol_type = other DNA
ccaactgtggggctgcccac

SEQ ID NO: 61019 - DNA, 20 bp, synthetic construct
  misc_feature 1..20: note = chemically synthesized
  source 1..20: mol_type = other DNA
caactgtggggctgcccact

SEQ ID NO: 61020 - DNA, 20 bp, synthetic construct
  misc_feature 1..20: note = chemically synthesized
  source 1..20: mol_type = other DNA
gctgcccactgggcatttca

SEQ ID NO: 61021 - DNA, 20 bp, synthetic construct
  misc_feature 1..20: note = chemically synthesized
  source 1..20: mol_type = other DNA
ctgcccactgggcatttcat

SEQ ID NO: 61022 - DNA, 20 bp, synthetic construct
  misc_feature 1..20: note = chemically synthesized
  source 1..20: mol_type = other DNA
cccactgggcatttcatagg

SEQ ID NO: 61023 - DNA, 20 bp, synthetic construct
  misc_feature 1..20: note = chemically synthesized
  source 1..20: mol_type = other DNA
tgggcatttcataggtggct

SEQ ID NO: 61024 - DNA, 20 bp, synthetic construct
  misc_feature 1..20: note = chemically synthesized
  source 1..20: mol_type = other DNA
gctcagtcctcttccctctg

SEQ ID NO: 61025 - DNA, 20 bp, synthetic construct
  misc_feature 1..20: note = chemically synthesized
  source 1..20: mol_type = other DNA
agtcctcttccctctgcagc

SEQ ID NO: 61026 - DNA, 20 bp, synthetic construct
  misc_feature 1..20: note = chemically synthesized
  source 1..20: mol_type = other DNA
cttccctctgcagctggccc

SEQ ID NO: 61027 - DNA, 20 bp, synthetic construct
  misc_feature 1..20: note = chemically synthesized
  source 1..20: mol_type = other DNA
agctggccccagaaacctgc

SEQ ID NO: 61028 - DNA, 20 bp, synthetic construct
  misc_feature 1..20: note = chemically synthesized
  source 1..20: mol_type = other DNA
cccagaaacctgccagttat

SEQ ID NO: 61029 - DNA, 20 bp, synthetic construct
  misc_feature 1..20: note = chemically synthesized
  source 1..20: mol_type = other DNA
aacctgccagttattggtgc

SEQ ID NO: 61030 - DNA, 20 bp, synthetic construct
  misc_feature 1..20: note = chemically synthesized
  source 1..20: mol_type = other DNA
acctgccagttattggtgcc

SEQ ID NO: 61031 - DNA, 20 bp, synthetic construct
  misc_feature 1..20: note = chemically synthesized
  source 1..20: mol_type = other DNA
tattggtgccaggtctgtgc

SEQ ID NO: 61032 - DNA, 20 bp, synthetic construct
  misc_feature 1..20: note = chemically synthesized
  source 1..20: mol_type = other DNA
attggtgccaggtctgtgcc

SEQ ID NO: 61033 - DNA, 20 bp, synthetic construct
  misc_feature 1..20: note = chemically synthesized
  source 1..20: mol_type = other DNA
tggtgccaggtctgtgccag

SEQ ID NO: 61034 - DNA, 20 bp, synthetic construct
  misc_feature 1..20: note = chemically synthesized
  source 1..20: mol_type = other DNA
ggtgccaggtctgtgccagg

SEQ ID NO: 61035 - DNA, 20 bp, synthetic construct
  misc_feature 1..20: note = chemically synthesized
  source 1..20: mol_type = other DNA
gtgccaggtctgtgccagga

SEQ ID NO: 61036 - DNA, 20 bp, synthetic construct
  misc_feature 1..20: note = chemically synthesized
  source 1..20: mol_type = other DNA
caggtctgtgccaggagggc

SEQ ID NO: 61037 - DNA, 20 bp, synthetic construct
  misc_feature 1..20: note = chemically synthesized
  source 1..20: mol_type = other DNA
aggtctgtgccaggagggcg

SEQ ID NO: 61038 - DNA, 20 bp, synthetic construct
  misc_feature 1..20: note = chemically synthesized
  source 1..20: mol_type = other DNA
agggcgaggcctgtcatttc

SEQ ID NO: 61039 - DNA, 20 bp, synthetic construct
  misc_feature 1..20: note = chemically synthesized
  source 1..20: mol_type = other DNA
tgtcatttctagtaatcctc

SEQ ID NO: 61040 - DNA, 20 bp, synthetic construct
  misc_feature 1..20: note = chemically synthesized
  source 1..20: mol_type = other DNA
gtcatttctagtaatcctct

SEQ ID NO: 61041 - DNA, 20 bp, synthetic construct
  misc_feature 1..20: note = chemically synthesized
  source 1..20: mol_type = other DNA
atttctagtaatcctctggg

SEQ ID NO: 61042 - DNA, 20 bp, synthetic construct
  misc_feature 1..20: note = chemically synthesized
  source 1..20: mol_type = other DNA
cagtgtgactgtacctcttg

SEQ ID NO: 61043 - DNA, 20 bp, synthetic construct
  misc_feature 1..20: note = chemically synthesized
  source 1..20: mol_type = other DNA
gtacctcttgcggcaactca

SEQ ID NO: 61044 - DNA, 20 bp, synthetic construct
  misc_feature 1..20: note = chemically synthesized
  source 1..20: mol_type = other DNA
tacctcttgcggcaactcaa

SEQ ID NO: 61045 - DNA, 20 bp, synthetic construct
  misc_feature 1..20: note = chemically synthesized
  source 1..20: mol_type = other DNA
acctcttgcggcaactcaaa

SEQ ID NO: 61046 - DNA, 20 bp, synthetic construct
  misc_feature 1..20: note = chemically synthesized
  source 1..20: mol_type = other DNA
ctcttgcggcaactcaaagg

SEQ ID NO: 61047 - DNA, 20 bp, synthetic construct
  misc_feature 1..20: note = chemically synthesized
  source 1..20: mol_type = other DNA
cttgcggcaactcaaaggga

SEQ ID NO: 61048 - DNA, 20 bp, synthetic construct
  misc_feature 1..20: note = chemically synthesized
  source 1..20: mol_type = other DNA
ttgcggcaactcaaagggag

SEQ ID NO: 61049 - DNA, 20 bp, synthetic construct
  misc_feature 1..20: note = chemically synthesized
  source 1..20: mol_type = other DNA
tgcggcaactcaaagggaga

SEQ ID NO: 61050 - DNA, 20 bp, synthetic construct
  misc_feature 1..20: note = chemically synthesized
  source 1..20: mol_type = other DNA
agggagagggtgacttgtcc

SEQ ID NO: 61051 - DNA, 20 bp, synthetic construct
  misc_feature 1..20: note = chemically synthesized
  source 1..20: mol_type = other DNA
gggagagggtgacttgtccc

SEQ ID NO: 61052 - DNA, 20 bp, synthetic construct
  misc_feature 1..20: note = chemically synthesized
  source 1..20: mol_type = other DNA
gggtgacttgtcccgggtca

SEQ ID NO: 61053 - DNA, 20 bp, synthetic construct
  misc_feature 1..20: note = chemically synthesized
  source 1..20: mol_type = other DNA
gtgacttgtcccgggtcaca

SEQ ID NO: 61054 - DNA, 20 bp, synthetic construct
  misc_feature 1..20: note = chemically synthesized
  source 1..20: mol_type = other DNA
gtcccgggtcacagagctga

SEQ ID NO: 61055 - DNA, 20 bp, synthetic construct
  misc_feature 1..20: note = chemically synthesized
  source 1..20: mol_type = other DNA
tcccgggtcacagagctgaa

SEQ ID NO: 61056 - DNA, 20 bp, synthetic construct
  misc_feature 1..20: note = chemically synthesized
  source 1..20: mol_type = other DNA
cccgggtcacagagctgaaa

SEQ ID NO: 61057 - DNA, 20 bp, synthetic construct
  misc_feature 1..20: note = chemically synthesized
  source 1..20: mol_type = other DNA
gggtcacagagctgaaaggg

SEQ ID NO: 61058 - DNA, 20 bp, synthetic construct
  misc_feature 1..20: note = chemically synthesized
  source 1..20: mol_type = other DNA
ggtcacagagctgaaagggc

SEQ ID NO: 61059 - DNA, 20 bp, synthetic construct
  misc_feature 1..20: note = chemically synthesized
  source 1..20: mol_type = other DNA
agctgaaagggcaggtacaa

SEQ ID NO: 61060 - DNA, 20 bp, synthetic construct
  misc_feature 1..20: note = chemically synthesized
  source 1..20: mol_type = other DNA
gctgaaagggcaggtacaac

SEQ ID NO: 61061 - DNA, 20 bp, synthetic construct
  misc_feature 1..20: note = chemically synthesized
  source 1..20: mol_type = other DNA
aggtacaacaggtgacatgc

SEQ ID NO: 61062 - DNA, 20 bp, synthetic construct
  misc_feature 1..20: note = chemically synthesized
  source 1..20: mol_type = other DNA
ggtacaacaggtgacatgcc

SEQ ID NO: 61063 - DNA, 20 bp, synthetic construct
  misc_feature 1..20: note = chemically synthesized
  source 1..20: mol_type = other DNA
ggtgacatgccgggctgtct

SEQ ID NO: 61064 - DNA, 20 bp, synthetic construct
  misc_feature 1..20: note = chemically synthesized
  source 1..20: mol_type = other DNA
gccgggctgtctgagtttat

SEQ ID NO: 61065 - DNA, 20 bp, synthetic construct
  misc_feature 1..20: note = chemically synthesized
  source 1..20: mol_type = other DNA
ccgggctgtctgagtttatg

SEQ ID NO: 61066 - DNA, 20 bp, synthetic construct
  misc_feature 1..20: note = chemically synthesized
  source 1..20: mol_type = other DNA
cgggctgtctgagtttatga

SEQ ID NO: 61067 - DNA, 20 bp, synthetic construct
  misc_feature 1..20: note = chemically synthesized
  source 1..20: mol_type = other DNA
tgtctgagtttatgagggcc

SEQ ID NO: 61068 - DNA, 20 bp, synthetic construct
  misc_feature 1..20: note = chemically synthesized
  source 1..20: mol_type = other DNA
gggcccagtcttgtgtctgc

SEQ ID NO: 61069 - DNA, 20 bp, synthetic construct
  misc_feature 1..20: note = chemically synthesized
  source 1..20: mol_type = other DNA
ggcccagtcttgtgtctgcc

SEQ ID NO: 61070 - DNA, 20 bp, synthetic construct
  misc_feature 1..20: note = chemically synthesized
  source 1..20: mol_type = other DNA
tcttgtgtctgccgggcaat

SEQ ID NO: 61071 - DNA, 20 bp, synthetic construct
  misc_feature 1..20: note = chemically synthesized
  source 1..20: mol_type = other DNA
gtgtctgccgggcaatgagc

SEQ ID NO: 61072 - DNA, 20 bp, synthetic construct
  misc_feature 1..20: note = chemically synthesized
  source 1..20: mol_type = other DNA
tgtctgccgggcaatgagca

SEQ ID NO: 61073 - DNA, 20 bp, synthetic construct
  misc_feature 1..20: note = chemically synthesized
  source 1..20: mol_type = other DNA
agcaaggctccttcctgtcc

SEQ ID NO: 61074 - DNA, 20 bp, synthetic construct
  misc_feature 1..20: note = chemically synthesized
  source 1..20: mol_type = other DNA
ccaagctccccgcccctccc

SEQ ID NO: 61075 - DNA, 20 bp, synthetic construct
  misc_feature 1..20: note = chemically synthesized
  source 1..20: mol_type = other DNA
cagcctactgcctccacccg

SEQ ID NO: 61076 - DNA, 20 bp, synthetic construct
  misc_feature 1..20: note = chemically synthesized
  source 1..20: mol_type = other DNA
tccacccgaagtctacttcc

SEQ ID NO: 61077 - DNA, 20 bp, synthetic construct
  misc_feature 1..20: note = chemically synthesized
  source 1..20: mol_type = other DNA
ccacccgaagtctacttcct

SEQ ID NO: 61078 - DNA, 20 bp, synthetic construct
  misc_feature 1..20: note = chemically synthesized
  source 1..20: mol_type = other DNA
cccgaagtctacttcctggg

SEQ ID NO: 61079 - DNA, 20 bp, synthetic construct
  misc_feature 1..20: note = chemically synthesized
  source 1..20: mol_type = other DNA
ccgaagtctacttcctgggt

SEQ ID NO: 61080 - DNA, 20 bp, synthetic construct
  misc_feature 1..20: note = chemically synthesized
  source 1..20: mol_type = other DNA
aagtctacttcctgggtggg

SEQ ID NO: 61081 - DNA, 20 bp, synthetic construct
  misc_feature 1..20: note = chemically synthesized
  source 1..20: mol_type = other DNA
agtctacttcctgggtgggc

SEQ ID NO: 61082 - DNA, 20 bp, synthetic construct
  misc_feature 1..20: note = chemically synthesized
  source 1..20: mol_type = other DNA
cttcctgggtgggcaggaac

SEQ ID NO: 61083 - DNA, 20 bp, synthetic construct
  misc_feature 1..20: note = chemically synthesized
  source 1..20: mol_type = other DNA
ttcctgggtgggcaggaact

SEQ ID NO: 61084 - DNA, 20 bp, synthetic construct
  misc_feature 1..20: note = chemically synthesized
  source 1..20: mol_type = other DNA
caggaactgggcactgtgcc

SEQ ID NO: 61085 - DNA, 20 bp, synthetic construct
  misc_feature 1..20: note = chemically synthesized
  source 1..20: mol_type = other DNA
aggaactgggcactgtgccc

SEQ ID NO: 61086 - DNA, 20 bp, synthetic construct
  misc_feature 1..20: note = chemically synthesized
  source 1..20: mol_type = other DNA
ggaactgggcactgtgccca

SEQ ID NO: 61087 - DNA, 20 bp, synthetic construct
  misc_feature 1..20: note = chemically synthesized
  source 1..20: mol_type = other DNA
gggcatgcactgcctccacg

SEQ ID NO: 61088 - DNA, 20 bp, synthetic construct
  misc_feature 1..20: note = chemically synthesized
  source 1..20: mol_type = other DNA
tgcctccacgcagcaaccct

SEQ ID NO: 61089 - DNA, 20 bp, synthetic construct
  misc_feature 1..20: note = chemically synthesized
  source 1..20: mol_type = other DNA
cctccacgcagcaaccctca

SEQ ID NO: 61090 - DNA, 20 bp, synthetic construct
  misc_feature 1..20: note = chemically synthesized
  source 1..20: mol_type = other DNA
gcagcaaccctcagagtcct

SEQ ID NO: 61091 - DNA, 20 bp, synthetic construct
  misc_feature 1..20: note = chemically synthesized
  source 1..20: mol_type = other DNA
tcagagtcctgagctgaacc

SEQ ID NO: 61092 - DNA, 20 bp, synthetic construct
  misc_feature 1..20: note = chemically synthesized
  source 1..20: mol_type = other DNA
gagtcctgagctgaaccaag

SEQ ID NO: 61093 - DNA, 20 bp, synthetic construct
  misc_feature 1..20: note = chemically synthesized
  source 1..20: mol_type = other DNA
agtcctgagctgaaccaaga

SEQ ID NO: 61094 - DNA, 20 bp, synthetic construct
  misc_feature 1..20: note = chemically synthesized
  source 1..20: mol_type = other DNA
tcctgagctgaaccaagaag

SEQ ID NO: 61095 - DNA, 20 bp, synthetic construct
  misc_feature 1..20: note = chemically synthesized
  source 1..20: mol_type = other DNA
cctgagctgaaccaagaagg

SEQ ID NO: 61096 - DNA, 20 bp, synthetic construct
  misc_feature 1..20: note = chemically synthesized
  source 1..20: mol_type = other DNA
tgagctgaaccaagaaggag

SEQ ID NO: 61097 - DNA, 20 bp, synthetic construct
  misc_feature 1..20: note = chemically synthesized
  source 1..20: mol_type = other DNA
gagctgaaccaagaaggagg

SEQ ID NO: 61098 - DNA, 20 bp, synthetic construct
  misc_feature 1..20: note = chemically synthesized
  source 1..20: mol_type = other DNA
agctgaaccaagaaggagga

SEQ ID NO: 61099 - DNA, 20 bp, synthetic construct
  misc_feature 1..20: note = chemically synthesized
  source 1..20: mol_type = other DNA
gctgaaccaagaaggaggag

SEQ ID NO: 61100 - DNA, 20 bp, synthetic construct
  misc_feature 1..20: note = chemically synthesized
  source 1..20: mol_type = other DNA
ctgaaccaagaaggaggagg

SEQ ID NO: 61101 - DNA, 20 bp, synthetic construct
  misc_feature 1..20: note = chemically synthesized
  source 1..20: mol_type = other DNA
accaagaaggaggagggggt

SEQ ID NO: 61102 - DNA, 20 bp, synthetic construct
  misc_feature 1..20: note = chemically synthesized
  source 1..20: mol_type = other DNA
ccaagaaggaggagggggtc

SEQ ID NO: 61103 - DNA, 20 bp, synthetic construct
  misc_feature 1..20: note = chemically synthesized
  source 1..20: mol_type = other DNA
gaggagggggtcgggcctcc

SEQ ID NO: 61104 - DNA, 20 bp, synthetic construct
  misc_feature 1..20: note = chemically synthesized
  source 1..20: mol_type = other DNA
aggagggggtcgggcctccg

SEQ ID NO: 61105 - DNA, 20 bp, synthetic construct
  misc_feature 1..20: note = chemically synthesized
  source 1..20: mol_type = other DNA
agggggtcgggcctccgagg

SEQ ID NO: 61106 - DNA, 20 bp, synthetic construct
  misc_feature 1..20: note = chemically synthesized
  source 1..20: mol_type = other DNA
gggggtcgggcctccgagga

SEQ ID NO: 61107 - DNA, 20 bp, synthetic construct
  misc_feature 1..20: note = chemically synthesized
  source 1..20: mol_type = other DNA
tcgggcctccgaggaaggcc

SEQ ID NO: 61108 - DNA, 20 bp, synthetic construct
  misc_feature 1..20: note = chemically synthesized
  source 1..20: mol_type = other DNA
ggcctagccgctgctgctgc

SEQ ID NO: 61109 - DNA, 20 bp, synthetic construct
  misc_feature 1..20: note = chemically synthesized
  source 1..20: mol_type = other DNA
gcctagccgctgctgctgcc

SEQ ID NO: 61110 - DNA, 20 bp, synthetic construct
  misc_feature 1..20: note = chemically synthesized
  source 1..20: mol_type = other DNA
gctgctgctgccaggaattc

SEQ ID NO: 61111 - DNA, 20 bp, synthetic construct
  misc_feature 1..20: note = chemically synthesized
  source 1..20: mol_type = other DNA
ctgctgctgccaggaattcc

SEQ ID NO: 61112 - DNA, 20 bp, synthetic construct
  misc_feature 1..20: note = chemically synthesized
  source 1..20: mol_type = other DNA
tgctgccaggaattccaggt

SEQ ID NO: 61113 - DNA, 20 bp, synthetic construct
  misc_feature 1..20: note = chemically synthesized
  source 1..20: mol_type = other DNA
ctgccaggaattccaggttg

SEQ ID NO: 61114 - DNA, 20 bp, synthetic construct
  misc_feature 1..20: note = chemically synthesized
  source 1..20: mol_type = other DNA
tgccaggaattccaggttgg

SEQ ID NO: 61115 - DNA, 20 bp, synthetic construct
  misc_feature 1..20: note = chemically synthesized
  source 1..20: mol_type = other DNA
gccaggaattccaggttgga

SEQ ID NO: 61116 - DNA, 20 bp, synthetic construct
  misc_feature 1..20: note = chemically synthesized
  source 1..20: mol_type = other DNA
ccaggaattccaggttggag

SEQ ID NO: 61117 - DNA, 20 bp, synthetic construct
  misc_feature 1..20: note = chemically synthesized
  source 1..20: mol_type = other DNA
ggaattccaggttggagggg

SEQ ID NO: 61118 - DNA, 20 bp, synthetic construct
  misc_feature 1..20: note = chemically synthesized
  source 1..20: mol_type = other DNA
gaggggcggcaacctcctgc

SEQ ID NO: 61119 - DNA, 20 bp, synthetic construct
  misc_feature 1..20: note = chemically synthesized
  source 1..20: mol_type = other DNA
ggcaacctcctgccagcctt

SEQ ID NO: 61120 - DNA, 20 bp, synthetic construct
  misc_feature 1..20: note = chemically synthesized
  source 1..20: mol_type = other DNA
gcaacctcctgccagccttc

SEQ ID NO: 61121 - DNA, 20 bp, synthetic construct
  misc_feature 1..20: note = chemically synthesized
  source 1..20: mol_type = other DNA
ggccactctcctgtgcctgc

SEQ ID NO: 61122 - DNA, 20 bp, synthetic construct
  misc_feature 1..20: note = chemically synthesized
  source 1..20: mol_type = other DNA
cactctcctgtgcctgccag

SEQ ID NO: 61123 - DNA, 20 bp, synthetic construct
  misc_feature 1..20: note = chemically synthesized
  source 1..20: mol_type = other DNA
ctctcctgtgcctgccagaa

SEQ ID NO: 61124 - DNA, 20 bp, synthetic construct
  misc_feature 1..20: note = chemically synthesized
  source 1..20: mol_type = other DNA
cctgtgcctgccagaagaga

SEQ ID NO: 61125 - DNA, 20 bp, synthetic construct
  misc_feature 1..20: note = chemically synthesized
  source 1..20: mol_type = other DNA
tgtgcctgccagaagagaca

SEQ ID NO: 61126 - DNA, 20 bp, synthetic construct
  misc_feature 1..20: note = chemically synthesized
  source 1..20: mol_type = other DNA
tgccagaagagacagagctt

SEQ ID NO: 61127 - DNA, 20 bp, synthetic construct
  misc_feature 1..20: note = chemically synthesized
  source 1..20: mol_type = other DNA
gccagaagagacagagcttg

SEQ ID NO: 61128 - DNA, 20 bp, synthetic construct
  misc_feature 1..20: note = chemically synthesized
  source 1..20: mol_type = other DNA
cagaagagacagagcttgag

SEQ ID NO: 61129 - DNA, 20 bp, synthetic construct
  misc_feature 1..20: note = chemically synthesized
  source 1..20: mol_type = other DNA
gaagagacagagcttgagga

SEQ ID NO: 61130 - DNA, 20 bp, synthetic construct
  misc_feature 1..20: note = chemically synthesized
  source 1..20: mol_type = other DNA
acagagcttgaggagagctt

SEQ ID NO: 61131 - DNA, 20 bp, synthetic construct
  misc_feature 1..20: note = chemically synthesized
  source 1..20: mol_type = other DNA
cagagcttgaggagagcttg

SEQ ID NO: 61132 - DNA, 20 bp, synthetic construct
  misc_feature 1..20: note = chemically synthesized
  source 1..20: mol_type = other DNA
gagcttgaggagagcttgag

SEQ ID NO: 61133 - DNA, 20 bp, synthetic construct
  misc_feature 1..20: note = chemically synthesized
  source 1..20: mol_type = other DNA
gcttgaggagagcttgagga

SEQ ID NO: 61134 - DNA, 20 bp, synthetic construct
  misc_feature 1..20: note = chemically synthesized
  source 1..20: mol_type = other DNA
tgaggagagcttgaggagag

SEQ ID NO: 61135 - DNA, 20 bp, synthetic construct
  misc_feature 1..20: note = chemically synthesized
  source 1..20: mol_type = other DNA
gaggagagcttgaggagagc

SEQ ID NO: 61136 - DNA, 20 bp, synthetic construct
  misc_feature 1..20: note = chemically synthesized
  source 1..20: mol_type = other DNA
agagcttgaggagagcagga

SEQ ID NO: 61137 - DNA, 20 bp, synthetic construct
  misc_feature 1..20: note = chemically synthesized
  source 1..20: mol_type = other DNA
gagcttgaggagagcaggaa

SEQ ID NO: 61138 - DNA, 20 bp, synthetic construct
  misc_feature 1..20: note = chemically synthesized
  source 1..20: mol_type = other DNA
cttgaggagagcaggaaagg

SEQ ID NO: 61139 - DNA, 20 bp, synthetic construct
  misc_feature 1..20: note = chemically synthesized
  source 1..20: mol_type = other DNA
ttgaggagagcaggaaaggt

SEQ ID NO: 61140 - DNA, 20 bp, synthetic construct
  misc_feature 1..20: note = chemically synthesized
  source 1..20: mol_type = other DNA
cattgctgctgctgctcact

SEQ ID NO: 61141 - DNA, 20 bp, synthetic construct
  misc_feature 1..20: note = chemically synthesized
  source 1..20: mol_type = other DNA
ctgctgctcactcagttcca

SEQ ID NO: 61142 - DNA, 20 bp, synthetic construct
  misc_feature 1..20: note = chemically synthesized
  source 1..20: mol_type = other DNA
tgctgctcactcagttccac

SEQ ID NO: 61143 - DNA, 20 bp, synthetic construct
  misc_feature 1..20: note = chemically synthesized
  source 1..20: mol_type = other DNA
tgctcactcagttccacagg

SEQ ID NO: 61144 - DNA, 20 bp, synthetic construct
  misc_feature 1..20: note = chemically synthesized
  source 1..20: mol_type = other DNA
gctcactcagttccacaggt

SEQ ID NO: 61145 - DNA, 20 bp, synthetic construct
  misc_feature 1..20: note = chemically synthesized
  source 1..20: mol_type = other DNA
tcactcagttccacaggtgg

SEQ ID NO: 61146 - DNA, 20 bp, synthetic construct
  misc_feature 1..20: note = chemically synthesized
  source 1..20: mol_type = other DNA
cactcagttccacaggtggg

SEQ ID NO: 61147 - DNA, 20 bp, synthetic construct
  misc_feature 1..20: note = chemically synthesized
  source 1..20: mol_type = other DNA
actcagttccacaggtggga

SEQ ID NO: 61148 - DNA, 20 bp, synthetic construct
  misc_feature 1..20: note = chemically synthesized
  source 1..20: mol_type = other DNA
agttccacaggtgggaggga

SEQ ID NO: 61149 - DNA, 20 bp, synthetic construct
  misc_feature 1..20: note = chemically synthesized
  source 1..20: mol_type = other DNA
tccacaggtgggagggacag

SEQ ID NO: 61150 - DNA, 20 bp, synthetic construct
  misc_feature 1..20: note = chemically synthesized
  source 1..20: mol_type = other DNA
ccacaggtgggagggacagc

SEQ ID NO: 61151 - DNA, 20 bp, synthetic construct
  misc_feature 1..20: note = chemically synthesized
  source 1..20: mol_type = other DNA
cacaggtgggagggacagca

SEQ ID NO: 61152 - DNA, 20 bp, synthetic construct
  misc_feature 1..20: note = chemically synthesized
  source 1..20: mol_type = other DNA
gtgggagggacagcagggct

SEQ ID NO: 61153 - DNA, 20 bp, synthetic construct
  misc_feature 1..20: note = chemically synthesized
  source 1..20: mol_type = other DNA
gggagggacagcagggctta

SEQ ID NO: 61154 - DNA, 20 bp, synthetic construct
  misc_feature 1..20: note = chemically synthesized
  source 1..20: mol_type = other DNA
agggacagcagggcttagag

SEQ ID NO: 61155 - DNA, 20 bp, synthetic construct
  misc_feature 1..20: note = chemically synthesized
  source 1..20: mol_type = other DNA
gggacagcagggcttagagt

SEQ ID NO: 61156 - DNA, 20 bp, synthetic construct
  misc_feature 1..20: note = chemically synthesized
  source 1..20: mol_type = other DNA
ggacagcagggcttagagtg

SEQ ID NO: 61157 - DNA, 20 bp, synthetic construct
  misc_feature 1..20: note = chemically synthesized
  source 1..20: mol_type = other DNA
gacagcagggcttagagtgg

SEQ ID NO: 61158 - DNA, 20 bp, synthetic construct
  misc_feature 1..20: note = chemically synthesized
  source 1..20: mol_type = other DNA
ttagagtgggggtcattgtg

SEQ ID NO: 61159 - DNA, 20 bp, synthetic construct
  misc_feature 1..20: note = chemically synthesized
  source 1..20: mol_type = other DNA
agtgggggtcattgtgcaga

SEQ ID NO: 61160 - DNA, 20 bp, synthetic construct
  misc_feature 1..20: note = chemically synthesized
  source 1..20: mol_type = other DNA
gtgggggtcattgtgcagat

SEQ ID NO: 61161 - DNA, 20 bp, synthetic construct
  misc_feature 1..20: note = chemically synthesized
  source 1..20: mol_type = other DNA
attgtgcagatgggaaaaca

SEQ ID NO: 61162 - DNA, 20 bp, synthetic construct
  misc_feature 1..20: note = chemically synthesized
  source 1..20: mol_type = other DNA
ttgtgcagatgggaaaacaa

SEQ ID NO: 61163 - DNA, 20 bp, synthetic construct
  misc_feature 1..20: note = chemically synthesized
  source 1..20: mol_type = other DNA
cagatgggaaaacaaaggcc

SEQ ID NO: 61164 - DNA, 20 bp, synthetic construct
  misc_feature 1..20: note = chemically synthesized
  source 1..20: mol_type = other DNA
gatgggaaaacaaaggccca

SEQ ID NO: 61165 - DNA, 20 bp, synthetic construct
  misc_feature 1..20: note = chemically synthesized
  source 1..20: mol_type = other DNA
tgggaaaacaaaggcccaga

SEQ ID NO: 61166 - DNA, 20 bp, synthetic construct
  misc_feature 1..20: note = chemically synthesized
  source 1..20: mol_type = other DNA
gggaaaacaaaggcccagag

SEQ ID NO: 61167 - DNA, 20 bp, synthetic construct
  misc_feature 1..20: note = chemically synthesized
  source 1..20: mol_type = other DNA
ggaaaacaaaggcccagaga

SEQ ID NO: 61168 - DNA, 20 bp, synthetic construct
  misc_feature 1..20: note = chemically synthesized
  source 1..20: mol_type = other DNA
gaaaacaaaggcccagagag

SEQ ID NO: 61169 - DNA, 20 bp, synthetic construct
  misc_feature 1..20: note = chemically synthesized
  source 1..20: mol_type = other DNA
aacaaaggcccagagagggg

SEQ ID NO: 61170 - DNA, 20 bp, synthetic construct
  misc_feature 1..20: note = chemically synthesized
  source 1..20: mol_type = other DNA
cagagaggggaagaaatgcc

SEQ ID NO: 61171 - DNA, 20 bp, synthetic construct
  misc_feature 1..20: note = chemically synthesized
  source 1..20: mol_type = other DNA
agagaggggaagaaatgccc

SEQ ID NO: 61172 - DNA, 20 bp, synthetic construct
  misc_feature 1..20: note = chemically synthesized
  source 1..20: mol_type = other DNA
agaggggaagaaatgcccag

SEQ ID NO: 61173 - DNA, 20 bp, synthetic construct
  misc_feature 1..20: note = chemically synthesized
  source 1..20: mol_type = other DNA
agaaatgcccaggagctacc

SEQ ID NO: 61174 - DNA, 20 bp, synthetic construct
  misc_feature 1..20: note = chemically synthesized
  source 1..20: mol_type = other DNA
gaaatgcccaggagctaccg

SEQ ID NO: 61175 - DNA, 20 bp, synthetic construct
  misc_feature 1..20: note = chemically synthesized
  source 1..20: mol_type = other DNA
aaatgcccaggagctaccga

SEQ ID NO: 61176 - DNA, 20 bp, synthetic construct
  misc_feature 1..20: note = chemically synthesized
  source 1..20: mol_type = other DNA
tgcccaggagctaccgaggg

SEQ ID NO: 61177 - DNA, 20 bp, synthetic construct
  misc_feature 1..20: note = chemically synthesized
  source 1..20: mol_type = other DNA
gcccaggagctaccgagggc

SEQ ID NO: 61178 - DNA, 20 bp, synthetic construct
  misc_feature 1..20: note = chemically synthesized
  source 1..20: mol_type = other DNA
agggcaggcgacctcaacca

SEQ ID NO: 61179 - DNA, 20 bp, synthetic construct
  misc_feature 1..20: note = chemically synthesized
  source 1..20: mol_type = other DNA
aggcgacctcaaccacagcc

SEQ ID NO: 61180 - DNA, 20 bp, synthetic construct
  misc_feature 1..20: note = chemically synthesized
  source 1..20: mol_type = other DNA
cctcaaccacagcccagtgc

SEQ ID NO: 61181 - DNA, 20 bp, synthetic construct
  misc_feature 1..20: note = chemically synthesized
  source 1..20: mol_type = other DNA
tcaaccacagcccagtgctg

SEQ ID NO: 61182 - DNA, 20 bp, synthetic construct
  misc_feature 1..20: note = chemically synthesized
  source 1..20: mol_type = other DNA
cagcccagtgctggagctgt

SEQ ID NO: 61183 - DNA, 20 bp, synthetic construct
  misc_feature 1..20: note = chemically synthesized
  source 1..20: mol_type = other DNA
cccagtgctggagctgtgag

SEQ ID NO: 61184 - DNA, 20 bp, synthetic construct
  misc_feature 1..20: note = chemically synthesized
  source 1..20: mol_type = other DNA
gctggagctgtgagtggatg

SEQ ID NO: 61185 - DNA, 20 bp, synthetic construct
  misc_feature 1..20: note = chemically synthesized
  source 1..20: mol_type = other DNA
tggagctgtgagtggatgta

SEQ ID NO: 61186 - DNA, 20 bp, synthetic construct
  misc_feature 1..20: note = chemically synthesized
  source 1..20: mol_type = other DNA
agctgtgagtggatgtagag

SEQ ID NO: 61187 - DNA, 20 bp, synthetic construct
  misc_feature 1..20: note = chemically synthesized
  source 1..20: mol_type = other DNA
tgtgagtggatgtagagcag

SEQ ID NO: 61188 - DNA, 20 bp, synthetic construct
  misc_feature 1..20: note = chemically synthesized
  source 1..20: mol_type = other DNA
agagcagcggaatatccatt

SEQ ID NO: 61189 - DNA, 20 bp, synthetic construct
  misc_feature 1..20: note = chemically synthesized
  source 1..20: mol_type = other DNA
cagcggaatatccattcagc

SEQ ID NO: 61190 - DNA, 20 bp, synthetic construct
  misc_feature 1..20: note = chemically synthesized
  source 1..20: mol_type = other DNA
gaatatccattcagccagct

SEQ ID NO: 61191 - DNA, 20 bp, synthetic construct
  misc_feature 1..20: note = chemically synthesized
  source 1..20: mol_type = other DNA
aatatccattcagccagctc

SEQ ID NO: 61192 - DNA, 20 bp, synthetic construct
  misc_feature 1..20: note = chemically synthesized
  source 1..20: mol_type = other DNA
atatccattcagccagctca

SEQ ID NO: 61193 - DNA, 20 bp, synthetic construct
  misc_feature 1..20: note = chemically synthesized
  source 1..20: mol_type = other DNA
tatccattcagccagctcag

SEQ ID NO: 61194 - DNA, 20 bp, synthetic construct
  misc_feature 1..20: note = chemically synthesized
  source 1..20: mol_type = other DNA
ccattcagccagctcagggg

SEQ ID NO: 61195 - DNA, 20 bp, synthetic construct
  misc_feature 1..20: note = chemically synthesized
  source 1..20: mol_type = other DNA
cattcagccagctcagggga

SEQ ID NO: 61196 - DNA, 20 bp, synthetic construct
  misc_feature 1..20: note = chemically synthesized
  source 1..20: mol_type = other DNA
cagccagctcaggggaagga

SEQ ID NO: 61197 - DNA, 20 bp, synthetic construct
  misc_feature 1..20: note = chemically synthesized
  source 1..20: mol_type = other DNA
agccagctcaggggaaggac

SEQ ID NO: 61198 - DNA, 20 bp, synthetic construct
  misc_feature 1..20: note = chemically synthesized
  source 1..20: mol_type = other DNA
gccagctcaggggaaggaca

SEQ ID NO: 61199 - DNA, 20 bp, synthetic construct
  misc_feature 1..20: note = chemically synthesized
  source 1..20: mol_type = other DNA
ccagctcaggggaaggacag

SEQ ID NO: 61200 - DNA, 20 bp, synthetic construct
  misc_feature 1..20: note = chemically synthesized
  source 1..20: mol_type = other DNA
ggggaaggacaggggccctg

SEQ ID NO: 61201 - DNA, 20 bp, synthetic construct
  misc_feature 1..20: note = chemically synthesized
  source 1..20: mol_type = other DNA
aaggacaggggccctgaagc

SEQ ID NO: 61202 - DNA, 20 bp, synthetic construct
  misc_feature 1..20: note = chemically synthesized
  source 1..20: mol_type = other DNA
aggacaggggccctgaagcc

SEQ ID NO: 61203 - DNA, 20 bp, synthetic construct
  misc_feature 1..20: note = chemically synthesized
  source 1..20: mol_type = other DNA
ggacaggggccctgaagcca

SEQ ID NO: 61204 - DNA, 20 bp, synthetic construct
  misc_feature 1..20: note = chemically synthesized
  source 1..20: mol_type = other DNA
gacaggggccctgaagccag

SEQ ID NO: 61205 - DNA, 20 bp, synthetic construct
  misc_feature 1..20: note = chemically synthesized
  source 1..20: mol_type = other DNA
ggggccctgaagccagggga

SEQ ID NO: 61206 - DNA, 20 bp, synthetic construct
  misc_feature 1..20: note = chemically synthesized
  source 1..20: mol_type = other DNA
ggccctgaagccaggggatg

SEQ ID NO: 61207 - DNA, 20 bp, synthetic construct
  misc_feature 1..20: note = chemically synthesized
  source 1..20: mol_type = other DNA
gaagccaggggatggagctg

SEQ ID NO: 61208 - DNA, 20 bp, synthetic construct
  misc_feature 1..20: note = chemically synthesized
  source 1..20: mol_type = other DNA
aagccaggggatggagctgc

SEQ ID NO: 61209 - DNA, 20 bp, synthetic construct
  misc_feature 1..20: note = chemically synthesized
  source 1..20: mol_type = other DNA
agccaggggatggagctgca

SEQ ID NO: 61210 - DNA, 20 bp, synthetic construct
  misc_feature 1..20: note = chemically synthesized
  source 1..20: mol_type = other DNA
caggggatggagctgcaggg

SEQ ID NO: 61211 - DNA, 20 bp, synthetic construct
  misc_feature 1..20: note = chemically synthesized
  source 1..20: mol_type = other DNA
aggggatggagctgcaggga

SEQ ID NO: 61212 - DNA, 20 bp, synthetic construct
  misc_feature 1..20: note = chemically synthesized
  source 1..20: mol_type = other DNA
ggggatggagctgcagggaa

SEQ ID NO: 61213 - DNA, 20 bp, synthetic construct
  misc_feature 1..20: note = chemically synthesized
  source 1..20: mol_type = other DNA
ggatggagctgcagggaagg

SEQ ID NO: 61214 - DNA, 20 bp, synthetic construct
  misc_feature 1..20: note = chemically synthesized
  source 1..20: mol_type = other DNA
gagctgcagggaagggagct

SEQ ID NO: 61215 - DNA, 20 bp, synthetic construct
  misc_feature 1..20: note = chemically synthesized
  source 1..20: mol_type = other DNA
gctgcagggaagggagctca

SEQ ID NO: 61216 - DNA, 20 bp, synthetic construct
  misc_feature 1..20: note = chemically synthesized
  source 1..20: mol_type = other DNA
tgcagggaagggagctcaga

SEQ ID NO: 61217 - DNA, 20 bp, synthetic construct
  misc_feature 1..20: note = chemically synthesized
  source 1..20: mol_type = other DNA
agggaagggagctcagagag

SEQ ID NO: 61218 - DNA, 20 bp, synthetic construct
  misc_feature 1..20: note = chemically synthesized
  source 1..20: mol_type = other DNA
gggaagggagctcagagaga

SEQ ID NO: 61219 - DNA, 20 bp, synthetic construct
  misc_feature 1..20: note = chemically synthesized
  source 1..20: mol_type = other DNA
ggaagggagctcagagagaa

SEQ ID NO: 61220 - DNA, 20 bp, synthetic construct
  misc_feature 1..20: note = chemically synthesized
  source 1..20: mol_type = other DNA
gaagggagctcagagagaag

SEQ ID NO: 61221 - DNA, 20 bp, synthetic construct
  misc_feature 1..20: note = chemically synthesized
  source 1..20: mol_type = other DNA
agggagctcagagagaaggg

SEQ ID NO: 61222 - DNA, 20 bp, synthetic construct
  misc_feature 1..20: note = chemically synthesized
  source 1..20: mol_type = other DNA
gggagctcagagagaagggg

SEQ ID NO: 61223 - DNA, 20 bp, synthetic construct
  misc_feature 1..20: note = chemically synthesized
  source 1..20: mol_type = other DNA
ggagctcagagagaagggga

SEQ ID NO: 61224 - DNA, 20 bp, synthetic construct
  misc_feature 1..20: note = chemically synthesized
  source 1..20: mol_type = other DNA
gagctcagagagaaggggag

SEQ ID NO: 61225 - DNA, 20 bp, synthetic construct
  misc_feature 1..20: note = chemically synthesized
  source 1..20: mol_type = other DNA
gctcagagagaaggggaggg

SEQ ID NO: 61226 - DNA, 20 bp, synthetic construct
  misc_feature 1..20: note = chemically synthesized
  source 1..20: mol_type = other DNA
agagaaggggaggggagtct

SEQ ID NO: 61227 - DNA, 20 bp, synthetic construct
  misc_feature 1..20: note = chemically synthesized
  source 1..20: mol_type = other DNA
aggggaggggagtctgagct

SEQ ID NO: 61228 - DNA, 20 bp, synthetic construct
  misc_feature 1..20: note = chemically synthesized
  source 1..20: mol_type = other DNA
ctcagtttcccgctgcctga

SEQ ID NO: 61229 - DNA, 20 bp, synthetic construct
  misc_feature 1..20: note = chemically synthesized
  source 1..20: mol_type = other DNA
tcagtttcccgctgcctgaa

SEQ ID NO: 61230 - DNA, 20 bp, synthetic construct
  misc_feature 1..20: note = chemically synthesized
  source 1..20: mol_type = other DNA
agtttcccgctgcctgaaag

SEQ ID NO: 61231 - DNA, 20 bp, synthetic construct
  misc_feature 1..20: note = chemically synthesized
  source 1..20: mol_type = other DNA
gtttcccgctgcctgaaagg

SEQ ID NO: 61232 - DNA, 20 bp, synthetic construct
  misc_feature 1..20: note = chemically synthesized
  source 1..20: mol_type = other DNA
tttcccgctgcctgaaagga

SEQ ID NO: 61233 - DNA, 20 bp, synthetic construct
  misc_feature 1..20: note = chemically synthesized
  source 1..20: mol_type = other DNA
cccgctgcctgaaaggaggg

SEQ ID NO: 61234 - DNA, 20 bp, synthetic construct
  misc_feature 1..20: note = chemically synthesized
  source 1..20: mol_type = other DNA
ggtggtacctactcccttca

SEQ ID NO: 61235 - DNA, 20 bp, synthetic construct
  misc_feature 1..20: note = chemically synthesized
  source 1..20: mol_type = other DNA
gtggtacctactcccttcac

SEQ ID NO: 61236 - DNA, 20 bp, synthetic construct
  misc_feature 1..20: note = chemically synthesized
  source 1..20: mol_type = other DNA
tggtacctactcccttcaca

SEQ ID NO: 61237 - DNA, 20 bp, synthetic construct
  misc_feature 1..20: note = chemically synthesized
  source 1..20: mol_type = other DNA
ccttcacagggtaactgaat

SEQ ID NO: 61238 - DNA, 20 bp, synthetic construct
  misc_feature 1..20: note = chemically synthesized
  source 1..20: mol_type = other DNA
ttcacagggtaactgaatga

SEQ ID NO: 61239 - DNA, 20 bp, synthetic construct
  misc_feature 1..20: note = chemically synthesized
  source 1..20: mol_type = other DNA
taactgaatgagagactgcc

SEQ ID NO: 61240 - DNA, 20 bp, synthetic construct
  misc_feature 1..20: note = chemically synthesized
  source 1..20: mol_type = other DNA
actgaatgagagactgcctg

SEQ ID NO: 61241 - DNA, 20 bp, synthetic construct
  misc_feature 1..20: note = chemically synthesized
  source 1..20: mol_type = other DNA
ctgaatgagagactgcctgg

SEQ ID NO: 61242 - DNA, 20 bp, synthetic construct
  misc_feature 1..20: note = chemically synthesized
  source 1..20: mol_type = other DNA
atgagagactgcctggagga

SEQ ID NO: 61243 - DNA, 20 bp, synthetic construct
  misc_feature 1..20: note = chemically synthesized
  source 1..20: mol_type = other DNA
tgcctggaggaaagctcttc

SEQ ID NO: 61244 - DNA, 20 bp, synthetic construct
  misc_feature 1..20: note = chemically synthesized
  source 1..20: mol_type = other DNA
ggaggaaagctcttcaagtg

SEQ ID NO: 61245 - DNA, 20 bp, synthetic construct
  misc_feature 1..20: note = chemically synthesized
  source 1..20: mol_type = other DNA
aagtgtggcccaccccaccc

SEQ ID NO: 61246 - DNA, 20 bp, synthetic construct
  misc_feature 1..20: note = chemically synthesized
  source 1..20: mol_type = other DNA
ccaccccaccccagtgacac

SEQ ID NO: 61247 - DNA, 20 bp, synthetic construct
  misc_feature 1..20: note = chemically synthesized
  source 1..20: mol_type = other DNA
agtgacaccagcccctgaca

SEQ ID NO: 61248 - DNA, 20 bp, synthetic construct
  misc_feature 1..20: note = chemically synthesized
  source 1..20: mol_type = other DNA
gtgacaccagcccctgacac

SEQ ID NO: 61249 - DNA, 20 bp, synthetic construct
  misc_feature 1..20: note = chemically synthesized
  source 1..20: mol_type = other DNA
tgacaccagcccctgacacg

SEQ ID NO: 61250 - DNA, 20 bp, synthetic construct
  misc_feature 1..20: note = chemically synthesized
  source 1..20: mol_type = other DNA
gacaccagcccctgacacgg

SEQ ID NO: 61251 - DNA, 20 bp, synthetic construct
  misc_feature 1..20: note = chemically synthesized
  source 1..20: mol_type = other DNA
caccagcccctgacacgggg

SEQ ID NO: 61252 - DNA, 20 bp, synthetic construct
  misc_feature 1..20: note = chemically synthesized
  source 1..20: mol_type = other DNA
accagcccctgacacggggg

SEQ ID NO: 61253 - DNA, 20 bp, synthetic construct
  misc_feature 1..20: note = chemically synthesized
  source 1..20: mol_type = other DNA
ccagcccctgacacggggga

SEQ ID NO: 61254 - DNA, 20 bp, synthetic construct
  misc_feature 1..20: note = chemically synthesized
  source 1..20: mol_type = other DNA
agcccctgacacgggggagg

SEQ ID NO: 61255 - DNA, 20 bp, synthetic construct
  misc_feature 1..20: note = chemically synthesized
  source 1..20: mol_type = other DNA
gcccctgacacgggggaggg

SEQ ID NO: 61256 - DNA, 20 bp, synthetic construct
  misc_feature 1..20: note = chemically synthesized
  source 1..20: mol_type = other DNA
cccctgacacgggggaggga

SEQ ID NO: 61257 - DNA, 20 bp, synthetic construct
  misc_feature 1..20: note = chemically synthesized
  source 1..20: mol_type = other DNA
ctgacacgggggagggaggg

SEQ ID NO: 61258 - DNA, 20 bp, synthetic construct
  misc_feature 1..20: note = chemically synthesized
  source 1..20: mol_type = other DNA
cgggggagggagggcagcat

SEQ ID NO: 61259 - DNA, 20 bp, synthetic construct
  misc_feature 1..20: note = chemically synthesized
  source 1..20: mol_type = other DNA
gggggagggagggcagcatc

SEQ ID NO: 61260 - DNA, 20 bp, synthetic construct
  misc_feature 1..20: note = chemically synthesized
  source 1..20: mol_type = other DNA
gggagggagggcagcatcag

SEQ ID NO: 61261 - DNA, 20 bp, synthetic construct
  misc_feature 1..20: note = chemically synthesized
  source 1..20: mol_type = other DNA
ggagggagggcagcatcagg

SEQ ID NO: 61262 - DNA, 20 bp, synthetic construct
  misc_feature 1..20: note = chemically synthesized
  source 1..20: mol_type = other DNA
gagggagggcagcatcagga

SEQ ID NO: 61263 - DNA, 20 bp, synthetic construct
  misc_feature 1..20: note = chemically synthesized
  source 1..20: mol_type = other DNA
agggagggcagcatcaggag

SEQ ID NO: 61264 - DNA, 20 bp, synthetic construct
  misc_feature 1..20: note = chemically synthesized
  source 1..20: mol_type = other DNA
cagcatcaggaggggctttc

SEQ ID NO: 61265 - DNA, 20 bp, synthetic construct
  misc_feature 1..20: note = chemically synthesized
  source 1..20: mol_type = other DNA
agcatcaggaggggctttct

SEQ ID NO: 61266 - DNA, 20 bp, synthetic construct
  misc_feature 1..20: note = chemically synthesized
  source 1..20: mol_type = other DNA
aggggctttctgggcacacc

SEQ ID NO: 61267 - DNA, 20 bp, synthetic construct
  misc_feature 1..20: note = chemically synthesized
  source 1..20: mol_type = other DNA
cacacccagtacccgtctct

SEQ ID NO: 61268 - DNA, 20 bp, synthetic construct
  misc_feature 1..20: note = chemically synthesized
  source 1..20: mol_type = other DNA
ctgttgcattttaatcctca

SEQ ID NO: 61269 - DNA, 20 bp, synthetic construct
  misc_feature 1..20: note = chemically synthesized
  source 1..20: mol_type = other DNA
ttgcattttaatcctcacag

SEQ ID NO: 61270 - DNA, 20 bp, synthetic construct
  misc_feature 1..20: note = chemically synthesized
  source 1..20: mol_type = other DNA
aatcctcacagcagctcaac

SEQ ID NO: 61271 - DNA, 20 bp, synthetic construct
  misc_feature 1..20: note = chemically synthesized
  source 1..20: mol_type = other DNA
atcctcacagcagctcaaca

SEQ ID NO: 61272 - DNA, 20 bp, synthetic construct
  misc_feature 1..20: note = chemically synthesized
  source 1..20: mol_type = other DNA
ccgtcaccatccccatttta

SEQ ID NO: 61273 - DNA, 20 bp, synthetic construct
  misc_feature 1..20: note = chemically synthesized
  source 1..20: mol_type = other DNA
caccatccccattttacaga

SEQ ID NO: 61274 - DNA, 20 bp, synthetic construct
  misc_feature 1..20: note = chemically synthesized
  source 1..20: mol_type = other DNA
accatccccattttacagat

SEQ ID NO: 61275 - DNA, 20 bp, synthetic construct
  misc_feature 1..20: note = chemically synthesized
  source 1..20: mol_type = other DNA
ccatccccattttacagata

SEQ ID NO: 61276 - DNA, 20 bp, synthetic construct
  misc_feature 1..20: note = chemically synthesized
  source 1..20: mol_type = other DNA
attttacagatagggaaatt

SEQ ID NO: 61277 - DNA, 20 bp, synthetic construct
  misc_feature 1..20: note = chemically synthesized
  source 1..20: mol_type = other DNA
ttttacagatagggaaattg

SEQ ID NO: 61278 - DNA, 20 bp, synthetic construct
  misc_feature 1..20: note = chemically synthesized
  source 1..20: mol_type = other DNA
cagatagggaaattgaggct

SEQ ID NO: 61279 - DNA, 20 bp, synthetic construct
  misc_feature 1..20: note = chemically synthesized
  source 1..20: mol_type = other DNA
gatagggaaattgaggctcg

SEQ ID NO: 61280 - DNA, 20 bp, synthetic construct
  misc_feature 1..20: note = chemically synthesized
  source 1..20: mol_type = other DNA
agggaaattgaggctcggag

SEQ ID NO: 61281 - DNA, 20 bp, synthetic construct
  misc_feature 1..20: note = chemically synthesized
  source 1..20: mol_type = other DNA
agcggttaaacaactcacct

SEQ ID NO: 61282 - DNA, 20 bp, synthetic construct
  misc_feature 1..20: note = chemically synthesized
  source 1..20: mol_type = other DNA
gcggttaaacaactcacctg

SEQ ID NO: 61283 - DNA, 20 bp, synthetic construct
  misc_feature 1..20: note = chemically synthesized
  source 1..20: mol_type = other DNA
acaactcacctgaggcctca

SEQ ID NO: 61284 - DNA, 20 bp, synthetic construct
  misc_feature 1..20: note = chemically synthesized
  source 1..20: mol_type = other DNA
ctcacctgaggcctcacagc

SEQ ID NO: 61285 - DNA, 20 bp, synthetic construct
  misc_feature 1..20: note = chemically synthesized
  source 1..20: mol_type = other DNA
cctgaggcctcacagccagt

SEQ ID NO: 61286 - DNA, 20 bp, synthetic construct
  misc_feature 1..20: note = chemically synthesized
  source 1..20: mol_type = other DNA
gaggcctcacagccagtaag

SEQ ID NO: 61287 - DNA, 20 bp, synthetic construct
  misc_feature 1..20: note = chemically synthesized
  source 1..20: mol_type = other DNA
aggcctcacagccagtaagt

SEQ ID NO: 61288 - DNA, 20 bp, synthetic construct
  misc_feature 1..20: note = chemically synthesized
  source 1..20: mol_type = other DNA
cagccagtaagtgggttccc

SEQ ID NO: 61289 - DNA, 20 bp, synthetic construct
  misc_feature 1..20: note = chemically synthesized
  source 1..20: mol_type = other DNA
cctggtctgaatgtgtgtgc

SEQ ID NO: 61290 - DNA, 20 bp, synthetic construct
  misc_feature 1..20: note = chemically synthesized
  source 1..20: mol_type = other DNA
tggtctgaatgtgtgtgctg

SEQ ID NO: 61291 - DNA, 20 bp, synthetic construct
  misc_feature 1..20: note = chemically synthesized
  source 1..20: mol_type = other DNA
ggtctgaatgtgtgtgctgg

SEQ ID NO: 61292 - DNA, 20 bp, synthetic construct
  misc_feature 1..20: note = chemically synthesized
  source 1..20: mol_type = other DNA
gtgtgtgctggaggatcctg

SEQ ID NO: 61293 - DNA, 20 bp, synthetic construct
  misc_feature 1..20: note = chemically synthesized
  source 1..20: mol_type = other DNA
tgtgtgctggaggatcctgt

SEQ ID NO: 61294 - DNA, 20 bp, synthetic construct
  misc_feature 1..20: note = chemically synthesized
  source 1..20: mol_type = other DNA
gatcctgtgggtcactcgcc

SEQ ID NO: 61295 - DNA, 20 bp, synthetic construct
  misc_feature 1..20: note = chemically synthesized
  source 1..20: mol_type = other DNA
cctgtgggtcactcgcctgg

SEQ ID NO: 61296 - DNA, 20 bp, synthetic construct
  misc_feature 1..20: note = chemically synthesized
  source 1..20: mol_type = other DNA
tgtgggtcactcgcctggta

SEQ ID NO: 61297 - DNA, 20 bp, synthetic construct
  misc_feature 1..20: note = chemically synthesized
  source 1..20: mol_type = other DNA
cactcgcctggtagagcccc

SEQ ID NO: 61298 - DNA, 20 bp, synthetic construct
  misc_feature 1..20: note = chemically synthesized
  source 1..20: mol_type = other DNA
actcgcctggtagagcccca

SEQ ID NO: 61299 - DNA, 20 bp, synthetic construct
  misc_feature 1..20: note = chemically synthesized
  source 1..20: mol_type = other DNA
cgcctggtagagccccaagg

SEQ ID NO: 61300 - DNA, 20 bp, synthetic construct
  misc_feature 1..20: note = chemically synthesized
  source 1..20: mol_type = other DNA
cctggtagagccccaaggtg

SEQ ID NO: 61301 - DNA, 20 bp, synthetic construct
  misc_feature 1..20: note = chemically synthesized
  source 1..20: mol_type = other DNA
ctggtagagccccaaggtgg

SEQ ID NO: 61302 - DNA, 20 bp, synthetic construct
  misc_feature 1..20: note = chemically synthesized
  source 1..20: mol_type = other DNA
ccccaaggtggaggcataaa

SEQ ID NO: 61303 - DNA, 20 bp, synthetic construct
  misc_feature 1..20: note = chemically synthesized
  source 1..20: mol_type = other DNA
cccaaggtggaggcataaat

SEQ ID NO: 61304 - DNA, 20 bp, synthetic construct
  misc_feature 1..20: note = chemically synthesized
  source 1..20: mol_type = other DNA
ggtggaggcataaatgggac

SEQ ID NO: 61305 - DNA, 20 bp, synthetic construct
  misc_feature 1..20: note = chemically synthesized
  source 1..20: mol_type = other DNA
taaatgggactggtgaatga

SEQ ID NO: 61306 - DNA, 20 bp, synthetic construct
  misc_feature 1..20: note = chemically synthesized
  source 1..20: mol_type = other DNA
atgggactggtgaatgacag

SEQ ID NO: 61307 - DNA, 20 bp, synthetic construct
  misc_feature 1..20: note = chemically synthesized
  source 1..20: mol_type = other DNA
tgggactggtgaatgacaga

SEQ ID NO: 61308 - DNA, 20 bp, synthetic construct
  misc_feature 1..20: note = chemically synthesized
  source 1..20: mol_type = other DNA
gggactggtgaatgacagaa

SEQ ID NO: 61309 - DNA, 20 bp, synthetic construct
  misc_feature 1..20: note = chemically synthesized
  source 1..20: mol_type = other DNA
ggactggtgaatgacagaag

SEQ ID NO: 61310 - DNA, 20 bp, synthetic construct
  misc_feature 1..20: note = chemically synthesized
  source 1..20: mol_type = other DNA
cactcatccattcactctgc

SEQ ID NO: 61311 - DNA, 20 bp, synthetic construct
  misc_feature 1..20: note = chemically synthesized
  source 1..20: mol_type = other DNA
attcactctgcaagtatcta

SEQ ID NO: 61312 - DNA, 20 bp, synthetic construct
  misc_feature 1..20: note = chemically synthesized
  source 1..20: mol_type = other DNA
agtatctacggcacgtacgc

SEQ ID NO: 61313 - DNA, 20 bp, synthetic construct
  misc_feature 1..20: note = chemically synthesized
  source 1..20: mol_type = other DNA
cggcacgtacgccagctccc

SEQ ID NO: 61314 - DNA, 20 bp, synthetic construct
  misc_feature 1..20: note = chemically synthesized
  source 1..20: mol_type = other DNA
cacgtacgccagctcccaag

SEQ ID NO: 61315 - DNA, 20 bp, synthetic construct
  misc_feature 1..20: note = chemically synthesized
  source 1..20: mol_type = other DNA
acgtacgccagctcccaagc

SEQ ID NO: 61316 - DNA, 20 bp, synthetic construct
  misc_feature 1..20: note = chemically synthesized
  source 1..20: mol_type = other DNA
ccagctcccaagcaggtttg

SEQ ID NO: 61317 - DNA, 20 bp, synthetic construct
  misc_feature 1..20: note = chemically synthesized
  source 1..20: mol_type = other DNA
cagctcccaagcaggtttgc

SEQ ID NO: 61318 - DNA, 20 bp, synthetic construct
  misc_feature 1..20: note = chemically synthesized
  source 1..20: mol_type = other DNA
aagcaggtttgcgggttgca

SEQ ID NO: 61319 - DNA, 20 bp, synthetic construct
  misc_feature 1..20: note = chemically synthesized
  source 1..20: mol_type = other DNA
caggtttgcgggttgcacag

SEQ ID NO: 61320 - DNA, 20 bp, synthetic construct
  misc_feature 1..20: note = chemically synthesized
  source 1..20: mol_type = other DNA
aggtttgcgggttgcacagc

SEQ ID NO: 61321 - DNA, 20 bp, synthetic construct
  misc_feature 1..20: note = chemically synthesized
  source 1..20: mol_type = other DNA
gcgggcgatgcaatctgatt

SEQ ID NO: 61322 - DNA, 20 bp, synthetic construct
  misc_feature 1..20: note = chemically synthesized
  source 1..20: mol_type = other DNA
cgggcgatgcaatctgattt

SEQ ID NO: 61323 - DNA, 20 bp, synthetic construct
  misc_feature 1..20: note = chemically synthesized
  source 1..20: mol_type = other DNA
caatctgatttaggctttta

SEQ ID NO: 61324 - DNA, 20 bp, synthetic construct
  misc_feature 1..20: note = chemically synthesized
  source 1..20: mol_type = other DNA
aatctgatttaggcttttaa

SEQ ID NO: 61325 - DNA, 20 bp, synthetic construct
  misc_feature 1..20: note = chemically synthesized
  source 1..20: mol_type = other DNA
atctgatttaggcttttaaa

SEQ ID NO: 61326 - DNA, 20 bp, synthetic construct
  misc_feature 1..20: note = chemically synthesized
  source 1..20: mol_type = other DNA
cttttaaagggattgcaatc

SEQ ID NO: 61327 - DNA, 20 bp, synthetic construct
  misc_feature 1..20: note = chemically synthesized
  source 1..20: mol_type = other DNA
ttaaagggattgcaatcaag

SEQ ID NO: 61328 - DNA, 20 bp, synthetic construct
  misc_feature 1..20: note = chemically synthesized
  source 1..20: mol_type = other DNA
taaagggattgcaatcaagt

SEQ ID NO: 61329 - DNA, 20 bp, synthetic construct
  misc_feature 1..20: note = chemically synthesized
  source 1..20: mol_type = other DNA
aaagggattgcaatcaagtg

SEQ ID NO: 61330 - DNA, 20 bp, synthetic construct
  misc_feature 1..20: note = chemically synthesized
  source 1..20: mol_type = other DNA
gcaatcaagtggggccccac

SEQ ID NO: 61331 - DNA, 20 bp, synthetic construct
  misc_feature 1..20: note = chemically synthesized
  source 1..20: mol_type = other DNA
cctcccctcccctccacccc

SEQ ID NO: 61332 - DNA, 20 bp, synthetic construct
  misc_feature 1..20: note = chemically synthesized
  source 1..20: mol_type = other DNA
cccctcccctccacccccag

SEQ ID NO: 61333 - DNA, 20 bp, synthetic construct
  misc_feature 1..20: note = chemically synthesized
  source 1..20: mol_type = other DNA
tccacccccagcagtctcca

SEQ ID NO: 61334 - DNA, 20 bp, synthetic construct
  misc_feature 1..20: note = chemically synthesized
  source 1..20: mol_type = other DNA
ccacccccagcagtctccaa

SEQ ID NO: 61335 - DNA, 20 bp, synthetic construct
  misc_feature 1..20: note = chemically synthesized
  source 1..20: mol_type = other DNA
ccaaaggcctccaacaaccc

SEQ ID NO: 61336 - DNA, 20 bp, synthetic construct
  misc_feature 1..20: note = chemically synthesized
  source 1..20: mol_type = other DNA
aaaggcctccaacaacccca

SEQ ID NO: 61337 - DNA, 20 bp, synthetic construct
  misc_feature 1..20: note = chemically synthesized
  source 1..20: mol_type = other DNA
ggcctccaacaaccccagag

SEQ ID NO: 61338 - DNA, 20 bp, synthetic construct
  misc_feature 1..20: note = chemically synthesized
  source 1..20: mol_type = other DNA
gcctccaacaaccccagagt

SEQ ID NO: 61339 - DNA, 20 bp, synthetic construct
  misc_feature 1..20: note = chemically synthesized
  source 1..20: mol_type = other DNA
cctccaacaaccccagagtg

SEQ ID NO: 61340 - DNA, 20 bp, synthetic construct
  misc_feature 1..20: note = chemically synthesized
  source 1..20: mol_type = other DNA
ctccaacaaccccagagtgg

SEQ ID NO: 61341 - DNA, 20 bp, synthetic construct
  misc_feature 1..20: note = chemically synthesized
  source 1..20: mol_type = other DNA
gagtgggggccatgtatcca

SEQ ID NO: 61342 - DNA, 20 bp, synthetic construct
  misc_feature 1..20: note = chemically synthesized
  source 1..20: mol_type = other DNA
catgtatccaaagaaactcc

SEQ ID NO: 61343 - DNA, 20 bp, synthetic construct
  misc_feature 1..20: note = chemically synthesized
  source 1..20: mol_type = other DNA
aagaaactccaagctgtata

SEQ ID NO: 61344 - DNA, 20 bp, synthetic construct
  misc_feature 1..20: note = chemically synthesized
  source 1..20: mol_type = other DNA
aagctgtatacggatcacac

SEQ ID NO: 61345 - DNA, 20 bp, synthetic construct
  misc_feature 1..20: note = chemically synthesized
  source 1..20: mol_type = other DNA
tacggatcacactggttttc

SEQ ID NO: 61346 - DNA, 20 bp, synthetic construct
  misc_feature 1..20: note = chemically synthesized
  source 1..20: mol_type = other DNA
acggatcacactggttttcc

SEQ ID NO: 61347 - DNA, 20 bp, synthetic construct
  misc_feature 1..20: note = chemically synthesized
  source 1..20: mol_type = other DNA
ggatcacactggttttccag

SEQ ID NO: 61348 - DNA, 20 bp, synthetic construct
  misc_feature 1..20: note = chemically synthesized
  source 1..20: mol_type = other DNA
tggttttccaggagcaaaaa

SEQ ID NO: 61349 - DNA, 20 bp, synthetic construct
  misc_feature 1..20: note = chemically synthesized
  source 1..20: mol_type = other DNA
tccaggagcaaaaacagaaa

SEQ ID NO: 61350 - DNA, 20 bp, synthetic construct
  misc_feature 1..20: note = chemically synthesized
  source 1..20: mol_type = other DNA
ccaggagcaaaaacagaaac

SEQ ID NO: 61351 - DNA, 20 bp, synthetic construct
  misc_feature 1..20: note = chemically synthesized
  source 1..20: mol_type = other DNA
gcaaaaacagaaacaggcct

SEQ ID NO: 61352 - DNA, 20 bp, synthetic construct
  misc_feature 1..20: note = chemically synthesized
  source 1..20: mol_type = other DNA
caaaaacagaaacaggcctg

SEQ ID NO: 61353 - DNA, 20 bp, synthetic construct
  misc_feature 1..20: note = chemically synthesized
  source 1..20: mol_type = other DNA
aacagaaacaggcctgaggc

SEQ ID NO: 61354 - DNA, 20 bp, synthetic construct
  misc_feature 1..20: note = chemically synthesized
  source 1..20: mol_type = other DNA
attgaacctcctcctgctct

SEQ ID NO: 61355 - DNA, 20 bp, synthetic construct
  misc_feature 1..20: note = chemically synthesized
  source 1..20: mol_type = other DNA
gaacctcctcctgctctgag

SEQ ID NO: 61356 - DNA, 20 bp, synthetic construct
  misc_feature 1..20: note = chemically synthesized
  source 1..20: mol_type = other DNA
tcctcctgctctgagcagcc

SEQ ID NO: 61357 - DNA, 20 bp, synthetic construct
  misc_feature 1..20: note = chemically synthesized
  source 1..20: mol_type = other DNA
cctcctgctctgagcagcct

SEQ ID NO: 61358 - DNA, 20 bp, synthetic construct
  misc_feature 1..20: note = chemically synthesized
  source 1..20: mol_type = other DNA
ctcctgctctgagcagcctg

SEQ ID NO: 61359 - DNA, 20 bp, synthetic construct
  misc_feature 1..20: note = chemically synthesized
  source 1..20: mol_type = other DNA
tcctgctctgagcagcctgg

SEQ ID NO: 61360 - DNA, 20 bp, synthetic construct
  misc_feature 1..20: note = chemically synthesized
  source 1..20: mol_type = other DNA
cctgctctgagcagcctggg

SEQ ID NO: 61361 - DNA, 20 bp, synthetic construct
  misc_feature 1..20: note = chemically synthesized
  source 1..20: mol_type = other DNA
gctctgagcagcctgggggg

SEQ ID NO: 61362 - DNA, 20 bp, synthetic construct
  misc_feature 1..20: note = chemically synthesized
  source 1..20: mol_type = other DNA
agcagcctggggggcagact

SEQ ID NO: 61363 - DNA, 20 bp, synthetic construct
  misc_feature 1..20: note = chemically synthesized
  source 1..20: mol_type = other DNA
agcctggggggcagactaag

SEQ ID NO: 61364 - DNA, 20 bp, synthetic construct
  misc_feature 1..20: note = chemically synthesized
  source 1..20: mol_type = other DNA
cctggggggcagactaagca

SEQ ID NO: 61365 - DNA, 20 bp, synthetic construct
  misc_feature 1..20: note = chemically synthesized
  source 1..20: mol_type = other DNA
ctggggggcagactaagcag

SEQ ID NO: 61366 - DNA, 20 bp, synthetic construct
  misc_feature 1..20: note = chemically synthesized
  source 1..20: mol_type = other DNA
tggggggcagactaagcaga

SEQ ID NO: 61367 - DNA, 20 bp, synthetic construct
  misc_feature 1..20: note = chemically synthesized
  source 1..20: mol_type = other DNA
agactaagcagagggctgtg

SEQ ID NO: 61368 - DNA, 20 bp, synthetic construct
  misc_feature 1..20: note = chemically synthesized
  source 1..20: mol_type = other DNA
gggctgtgcagacccacata

SEQ ID NO: 61369 - DNA, 20 bp, synthetic construct
  misc_feature 1..20: note = chemically synthesized
  source 1..20: mol_type = other DNA
gctgtgcagacccacataaa

SEQ ID NO: 61370 - DNA, 20 bp, synthetic construct
  misc_feature 1..20: note = chemically synthesized
  source 1..20: mol_type = other DNA
ataaagagcctactgtgtgc

SEQ ID NO: 61371 - DNA, 20 bp, synthetic construct
  misc_feature 1..20: note = chemically synthesized
  source 1..20: mol_type = other DNA
taaagagcctactgtgtgcc

SEQ ID NO: 61372 - DNA, 20 bp, synthetic construct
  misc_feature 1..20: note = chemically synthesized
  source 1..20: mol_type = other DNA
gtgtgccaggcacttcaccc

SEQ ID NO: 61373 - DNA, 20 bp, synthetic construct
  misc_feature 1..20: note = chemically synthesized
  source 1..20: mol_type = other DNA
tgtgccaggcacttcacccg

SEQ ID NO: 61374 - DNA, 20 bp, synthetic construct
  misc_feature 1..20: note = chemically synthesized
  source 1..20: mol_type = other DNA
cttcacccgaggcacttcac

SEQ ID NO: 61375 - DNA, 20 bp, synthetic construct
  misc_feature 1..20: note = chemically synthesized
  source 1..20: mol_type = other DNA
aggcacttcacaagcatgct

SEQ ID NO: 61376 - DNA, 20 bp, synthetic construct
  misc_feature 1..20: note = chemically synthesized
  source 1..20: mol_type = other DNA
ggcacttcacaagcatgctt

SEQ ID NO: 61377 - DNA, 20 bp, synthetic construct
  misc_feature 1..20: note = chemically synthesized
  source 1..20: mol_type = other DNA
gaatgaaacttccaactctt

SEQ ID NO: 61378 - DNA, 20 bp, synthetic construct
  misc_feature 1..20: note = chemically synthesized
  source 1..20: mol_type = other DNA
aatgaaacttccaactcttt

SEQ ID NO: 61379 - DNA, 20 bp, synthetic construct
  misc_feature 1..20: note = chemically synthesized
  source 1..20: mol_type = other DNA
acttccaactctttgggatg

SEQ ID NO: 61380 - DNA, 20 bp, synthetic construct
  misc_feature 1..20: note = chemically synthesized
  source 1..20: mol_type = other DNA
cttccaactctttgggatgc

SEQ ID NO: 61381 - DNA, 20 bp, synthetic construct
  misc_feature 1..20: note = chemically synthesized
  source 1..20: mol_type = other DNA
tctttgggatgcaggtgaaa

SEQ ID NO: 61382 - DNA, 20 bp, synthetic construct
  misc_feature 1..20: note = chemically synthesized
  source 1..20: mol_type = other DNA
gatgcaggtgaaacagttcc

SEQ ID NO: 61383 - DNA, 20 bp, synthetic construct
  misc_feature 1..20: note = chemically synthesized
  source 1..20: mol_type = other DNA
aggtgaaacagttcctggtt

SEQ ID NO: 61384 - DNA, 20 bp, synthetic construct
  misc_feature 1..20: note = chemically synthesized
  source 1..20: mol_type = other DNA
gtgaaacagttcctggttca

SEQ ID NO: 61385 - DNA, 20 bp, synthetic construct
  misc_feature 1..20: note = chemically synthesized
  source 1..20: mol_type = other DNA
gaaacagttcctggttcaga

SEQ ID NO: 61386 - DNA, 20 bp, synthetic construct
  misc_feature 1..20: note = chemically synthesized
  source 1..20: mol_type = other DNA
aaacagttcctggttcagag

SEQ ID NO: 61387 - DNA, 20 bp, synthetic construct
  misc_feature 1..20: note = chemically synthesized
  source 1..20: mol_type = other DNA
gttcctggttcagagaggtg

SEQ ID NO: 61388 - DNA, 20 bp, synthetic construct
  misc_feature 1..20: note = chemically synthesized
  source 1..20: mol_type = other DNA
cctggttcagagaggtgaag

SEQ ID NO: 61389 - DNA, 20 bp, synthetic construct
  misc_feature 1..20: note = chemically synthesized
  source 1..20: mol_type = other DNA
agaggtgaagcggcctgcct

SEQ ID NO: 61390 - DNA, 20 bp, synthetic construct
  misc_feature 1..20: note = chemically synthesized
  source 1..20: mol_type = other DNA
gaggtgaagcggcctgcctg

SEQ ID NO: 61391 - DNA, 20 bp, synthetic construct
  misc_feature 1..20: note = chemically synthesized
  source 1..20: mol_type = other DNA
gtgaagcggcctgcctgagg

SEQ ID NO: 61392 - DNA, 20 bp, synthetic construct
  misc_feature 1..20: note = chemically synthesized
  source 1..20: mol_type = other DNA
gcggcctgcctgaggcagca

SEQ ID NO: 61393 - DNA, 20 bp, synthetic construct
  misc_feature 1..20: note = chemically synthesized
  source 1..20: mol_type = other DNA
ggcagcacagctcttcttta

SEQ ID NO: 61394 - DNA, 20 bp, synthetic construct
  misc_feature 1..20: note = chemically synthesized
  source 1..20: mol_type = other DNA
cccacctctaccctgtctca

SEQ ID NO: 61395 - DNA, 20 bp, synthetic construct
  misc_feature 1..20: note = chemically synthesized
  source 1..20: mol_type = other DNA
tgtctcacggccccccatgc

SEQ ID NO: 61396 - DNA, 20 bp, synthetic construct
  misc_feature 1..20: note = chemically synthesized
  source 1..20: mol_type = other DNA
ggccccccatgccagcctga

SEQ ID NO: 61397 - DNA, 20 bp, synthetic construct
  misc_feature 1..20: note = chemically synthesized
  source 1..20: mol_type = other DNA
cctgacggttgtgtctgcct

SEQ ID NO: 61398 - DNA, 20 bp, synthetic construct
  misc_feature 1..20: note = chemically synthesized
  source 1..20: mol_type = other DNA
gtcatgctccatttttccat

SEQ ID NO: 61399 - DNA, 20 bp, synthetic construct
  misc_feature 1..20: note = chemically synthesized
  source 1..20: mol_type = other DNA
tcatgctccatttttccatc

SEQ ID NO: 61400 - DNA, 20 bp, synthetic construct
  misc_feature 1..20: note = chemically synthesized
  source 1..20: mol_type = other DNA
atttttccatcgggaccatc

SEQ ID NO: 61401 - DNA, 20 bp, synthetic construct
  misc_feature 1..20: note = chemically synthesized
  source 1..20: mol_type = other DNA
ttttccatcgggaccatcaa

SEQ ID NO: 61402 - DNA, 20 bp, synthetic construct
  misc_feature 1..20: note = chemically synthesized
  source 1..20: mol_type = other DNA
tttccatcgggaccatcaag

SEQ ID NO: 61403 - DNA, 20 bp, synthetic construct
  misc_feature 1..20: note = chemically synthesized
  source 1..20: mol_type = other DNA
ttccatcgggaccatcaaga

SEQ ID NO: 61404 - DNA, 20 bp, synthetic construct
  misc_feature 1..20: note = chemically synthesized
  source 1..20: mol_type = other DNA
tcaagagggtgtttgtgtct

SEQ ID NO: 61405 - DNA, 20 bp, synthetic construct
  misc_feature 1..20: note = chemically synthesized
  source 1..20: mol_type = other DNA
caagagggtgtttgtgtcta

SEQ ID NO: 61406 - DNA, 20 bp, synthetic construct
  misc_feature 1..20: note = chemically synthesized
  source 1..20: mol_type = other DNA
tgtttgtgtctaaggctgac

SEQ ID NO: 61407 - DNA, 20 bp, synthetic construct
  misc_feature 1..20: note = chemically synthesized
  source 1..20: mol_type = other DNA
gtttgtgtctaaggctgact

SEQ ID NO: 61408 - DNA, 20 bp, synthetic construct
  misc_feature 1..20: note = chemically synthesized
  source 1..20: mol_type = other DNA
taaggctgactgggtaactt

SEQ ID NO: 61409 - DNA, 20 bp, synthetic construct
  misc_feature 1..20: note = chemically synthesized
  source 1..20: mol_type = other DNA
ctgactgggtaactttggat

SEQ ID NO: 61410 - DNA, 20 bp, synthetic construct
  misc_feature 1..20: note = chemically synthesized
  source 1..20: mol_type = other DNA
actgggtaactttggatgag

SEQ ID NO: 61411 - DNA, 20 bp, synthetic construct
  misc_feature 1..20: note = chemically synthesized
  source 1..20: mol_type = other DNA
atgagcggtctctccgctct

SEQ ID NO: 61412 - DNA, 20 bp, synthetic construct
  misc_feature 1..20: note = chemically synthesized
  source 1..20: mol_type = other DNA
ctgtttcctcatctgtcaaa

SEQ ID NO: 61413 - DNA, 20 bp, synthetic construct
  misc_feature 1..20: note = chemically synthesized
  source 1..20: mol_type = other DNA
tgtttcctcatctgtcaaat

SEQ ID NO: 61414 - DNA, 20 bp, synthetic construct
  misc_feature 1..20: note = chemically synthesized
  source 1..20: mol_type = other DNA
tctaacccactctgatctcc

SEQ ID NO: 61415 - DNA, 20 bp, synthetic construct
  misc_feature 1..20: note = chemically synthesized
  source 1..20: mol_type = other DNA
ctaacccactctgatctccc

SEQ ID NO: 61416 - DNA, 20 bp, synthetic construct
  misc_feature 1..20: note = chemically synthesized
  source 1..20: mol_type = other DNA
taacccactctgatctccca

SEQ ID NO: 61417 - DNA, 20 bp, synthetic construct
  misc_feature 1..20: note = chemically synthesized
  source 1..20: mol_type = other DNA
cccactctgatctcccaggg

SEQ ID NO: 61418 - DNA, 20 bp, synthetic construct
  misc_feature 1..20: note = chemically synthesized
  source 1..20: mol_type = other DNA
actctgatctcccagggcgg

SEQ ID NO: 61419 - DNA, 20 bp, synthetic construct
  misc_feature 1..20: note = chemically synthesized
  source 1..20: mol_type = other DNA
tgatctcccagggcggcagt

SEQ ID NO: 61420 - DNA, 20 bp, synthetic construct
  misc_feature 1..20: note = chemically synthesized
  source 1..20: mol_type = other DNA
ccagggcggcagtaagtctt

SEQ ID NO: 61421 - DNA, 20 bp, synthetic construct
  misc_feature 1..20: note = chemically synthesized
  source 1..20: mol_type = other DNA
cggcagtaagtcttcagcat

SEQ ID NO: 61422 - DNA, 20 bp, synthetic construct
  misc_feature 1..20: note = chemically synthesized
  source 1..20: mol_type = other DNA
ggcagtaagtcttcagcatc

SEQ ID NO: 61423 - DNA, 20 bp, synthetic construct
  misc_feature 1..20: note = chemically synthesized
  source 1..20: mol_type = other DNA
gtcttcagcatcaggcattt

SEQ ID NO: 61424 - DNA, 20 bp, synthetic construct
  misc_feature 1..20: note = chemically synthesized
  source 1..20: mol_type = other DNA
tcttcagcatcaggcatttt

SEQ ID NO: 61425 - DNA, 20 bp, synthetic construct
  misc_feature 1..20: note = chemically synthesized
  source 1..20: mol_type = other DNA
cttcagcatcaggcattttg

SEQ ID NO: 61426 - DNA, 20 bp, synthetic construct
  misc_feature 1..20: note = chemically synthesized
  source 1..20: mol_type = other DNA
tcaggcattttggggtgact

SEQ ID NO: 61427 - DNA, 20 bp, synthetic construct
  misc_feature 1..20: note = chemically synthesized
  source 1..20: mol_type = other DNA
ttttggggtgactcagtaaa

SEQ ID NO: 61428 - DNA, 20 bp, synthetic construct
  misc_feature 1..20: note = chemically synthesized
  source 1..20: mol_type = other DNA
tggggtgactcagtaaatgg

SEQ ID NO: 61429 - DNA, 20 bp, synthetic construct
  misc_feature 1..20: note = chemically synthesized
  source 1..20: mol_type = other DNA
taaatggtagatcttgctac

SEQ ID NO: 61430 - DNA, 20 bp, synthetic construct
  misc_feature 1..20: note = chemically synthesized
  source 1..20: mol_type = other DNA
atggtagatcttgctaccag

SEQ ID NO: 61431 - DNA, 20 bp, synthetic construct
  misc_feature 1..20: note = chemically synthesized
  source 1..20: mol_type = other DNA
agatcttgctaccagtggaa

SEQ ID NO: 61432 - DNA, 20 bp, synthetic construct
  misc_feature 1..20: note = chemically synthesized
  source 1..20: mol_type = other DNA
ctaccagtggaacagccact

SEQ ID NO: 61433 - DNA, 20 bp, synthetic construct
  misc_feature 1..20: note = chemically synthesized
  source 1..20: mol_type = other DNA
taccagtggaacagccacta

SEQ ID NO: 61434 - DNA, 20 bp, synthetic construct
  misc_feature 1..20: note = chemically synthesized
  source 1..20: mol_type = other DNA
aacagccactaaggattctg

SEQ ID NO: 61435 - DNA, 20 bp, synthetic construct
  misc_feature 1..20: note = chemically synthesized
  source 1..20: mol_type = other DNA
gccactaaggattctgcagt

SEQ ID NO: 61436 - DNA, 20 bp, synthetic construct
  misc_feature 1..20: note = chemically synthesized
  source 1..20: mol_type = other DNA
cactaaggattctgcagtga

SEQ ID NO: 61437 - DNA, 20 bp, synthetic construct
  misc_feature 1..20: note = chemically synthesized
  source 1..20: mol_type = other DNA
taaggattctgcagtgagag

SEQ ID NO: 61438 - DNA, 20 bp, synthetic construct
  misc_feature 1..20: note = chemically synthesized
  source 1..20: mol_type = other DNA
aggattctgcagtgagagca

SEQ ID NO: 61439 - DNA, 20 bp, synthetic construct
  misc_feature 1..20: note = chemically synthesized
  source 1..20: mol_type = other DNA
ggattctgcagtgagagcag

SEQ ID NO: 61440 - DNA, 20 bp, synthetic construct
  misc_feature 1..20: note = chemically synthesized
  source 1..20: mol_type = other DNA
gattctgcagtgagagcaga

SEQ ID NO: 61441 - DNA, 20 bp, synthetic construct
  misc_feature 1..20: note = chemically synthesized
  source 1..20: mol_type = other DNA
ctgcagtgagagcagagggc

SEQ ID NO: 61442 - DNA, 20 bp, synthetic construct
  misc_feature 1..20: note = chemically synthesized
  source 1..20: mol_type = other DNA
gtgagagcagagggccagct

SEQ ID NO: 61443 - DNA, 20 bp, synthetic construct
  misc_feature 1..20: note = chemically synthesized
  source 1..20: mol_type = other DNA
agagcagagggccagctaag

SEQ ID NO: 61444 - DNA, 20 bp, synthetic construct
  misc_feature 1..20: note = chemically synthesized
  source 1..20: mol_type = other DNA
ccagctaagtggtactctcc

SEQ ID NO: 61445 - DNA, 20 bp, synthetic construct
  misc_feature 1..20: note = chemically synthesized
  source 1..20: mol_type = other DNA
agctaagtggtactctccca

SEQ ID NO: 61446 - DNA, 20 bp, synthetic construct
  misc_feature 1..20: note = chemically synthesized
  source 1..20: mol_type = other DNA
tcacgccaccccctccacct

SEQ ID NO: 61447 - DNA, 20 bp, synthetic construct
  misc_feature 1..20: note = chemically synthesized
  source 1..20: mol_type = other DNA
caccccctccaccttggaca

SEQ ID NO: 61448 - DNA, 20 bp, synthetic construct
  misc_feature 1..20: note = chemically synthesized
  source 1..20: mol_type = other DNA
accccctccaccttggacac

SEQ ID NO: 61449 - DNA, 20 bp, synthetic construct
  misc_feature 1..20: note = chemically synthesized
  source 1..20: mol_type = other DNA
accttggacacaggacgctg

SEQ ID NO: 61450 - DNA, 20 bp, synthetic construct
  misc_feature 1..20: note = chemically synthesized
  source 1..20: mol_type = other DNA
cacaggacgctgtggtttct

SEQ ID NO: 61451 - DNA, 20 bp, synthetic construct
  misc_feature 1..20: note = chemically synthesized
  source 1..20: mol_type = other DNA
ggacgctgtggtttctgagc

SEQ ID NO: 61452 - DNA, 20 bp, synthetic construct
  misc_feature 1..20: note = chemically synthesized
  source 1..20: mol_type = other DNA
gacgctgtggtttctgagcc

SEQ ID NO: 61453 - DNA, 20 bp, synthetic construct
  misc_feature 1..20: note = chemically synthesized
  source 1..20: mol_type = other DNA
ccaggtacaatgactccttt

SEQ ID NO: 61454 - DNA, 20 bp, synthetic construct
  misc_feature 1..20: note = chemically synthesized
  source 1..20: mol_type = other DNA
gtacaatgactcctttcggt

SEQ ID NO: 61455 - DNA, 20 bp, synthetic construct
  misc_feature 1..20: note = chemically synthesized
  source 1..20: mol_type = other DNA
atgactcctttcggtaagtg

SEQ ID NO: 61456 - DNA, 20 bp, synthetic construct
  misc_feature 1..20: note = chemically synthesized
  source 1..20: mol_type = other DNA
actcctttcggtaagtgcag

SEQ ID NO: 61457 - DNA, 20 bp, synthetic construct
  misc_feature 1..20: note = chemically synthesized
  source 1..20: mol_type = other DNA
cctttcggtaagtgcagtgg

SEQ ID NO: 61458 - DNA, 20 bp, synthetic construct
  misc_feature 1..20: note = chemically synthesized
  source 1..20: mol_type = other DNA
agtggaagctgtacactgcc

SEQ ID NO: 61459 - DNA, 20 bp, synthetic construct
  misc_feature 1..20: note = chemically synthesized
  source 1..20: mol_type = other DNA
gtggaagctgtacactgccc

SEQ ID NO: 61460 - DNA, 20 bp, synthetic construct
  misc_feature 1..20: note = chemically synthesized
  source 1..20: mol_type = other DNA
agctgtacactgcccaggca

SEQ ID NO: 61461 - DNA, 20 bp, synthetic construct
  misc_feature 1..20: note = chemically synthesized
  source 1..20: mol_type = other DNA
cactgcccaggcaaagcgtc

SEQ ID NO: 61462 - DNA, 20 bp, synthetic construct
  misc_feature 1..20: note = chemically synthesized
  source 1..20: mol_type = other DNA
actgcccaggcaaagcgtcc

SEQ ID NO: 61463 - DNA, 20 bp, synthetic construct
  misc_feature 1..20: note = chemically synthesized
  source 1..20: mol_type = other DNA
gcccaggcaaagcgtccggg

SEQ ID NO: 61464 - DNA, 20 bp, synthetic construct
  misc_feature 1..20: note = chemically synthesized
  source 1..20: mol_type = other DNA
ggcaaagcgtccgggcagcg

SEQ ID NO: 61465 - DNA, 20 bp, synthetic construct
  misc_feature 1..20: note = chemically synthesized
  source 1..20: mol_type = other DNA
gcaaagcgtccgggcagcgt

SEQ ID NO: 61466 - DNA, 20 bp, synthetic construct
  misc_feature 1..20: note = chemically synthesized
  source 1..20: mol_type = other DNA
aagcgtccgggcagcgtagg

SEQ ID NO: 61467 - DNA, 20 bp, synthetic construct
  misc_feature 1..20: note = chemically synthesized
  source 1..20: mol_type = other DNA
agcgtccgggcagcgtaggc

SEQ ID NO: 61468 - DNA, 20 bp, synthetic construct
  misc_feature 1..20: note = chemically synthesized
  source 1..20: mol_type = other DNA
ggcagcgtaggcgggcgact

SEQ ID NO: 61469 - DNA, 20 bp, synthetic construct
  misc_feature 1..20: note = chemically synthesized
  source 1..20: mol_type = other DNA
taggcgggcgactcagatcc

SEQ ID NO: 61470 - DNA, 20 bp, synthetic construct
  misc_feature 1..20: note = chemically synthesized
  source 1..20: mol_type = other DNA
cgggcgactcagatcccagc

SEQ ID NO: 61471 - DNA, 20 bp, synthetic construct
  misc_feature 1..20: note = chemically synthesized
  source 1..20: mol_type = other DNA
gcgactcagatcccagccag

SEQ ID NO: 61472 - DNA, 20 bp, synthetic construct
  misc_feature 1..20: note = chemically synthesized
  source 1..20: mol_type = other DNA
cagatcccagccagtggact

SEQ ID NO: 61473 - DNA, 20 bp, synthetic construct
  misc_feature 1..20: note = chemically synthesized
  source 1..20: mol_type = other DNA
ctgtttgctcctccgataac

SEQ ID NO: 61474 - DNA, 20 bp, synthetic construct
  misc_feature 1..20: note = chemically synthesized
  source 1..20: mol_type = other DNA
tgtttgctcctccgataact

SEQ ID NO: 61475 - DNA, 20 bp, synthetic construct
  misc_feature 1..20: note = chemically synthesized
  source 1..20: mol_type = other DNA
gtttgctcctccgataactg

SEQ ID NO: 61476 - DNA, 20 bp, synthetic construct
  misc_feature 1..20: note = chemically synthesized
  source 1..20: mol_type = other DNA
tccgataactggggtgacct

SEQ ID NO: 61477 - DNA, 20 bp, synthetic construct
  misc_feature 1..20: note = chemically synthesized
  source 1..20: mol_type = other DNA
tgaccttggttaatattcac

SEQ ID NO: 61478 - DNA, 20 bp, synthetic construct
  misc_feature 1..20: note = chemically synthesized
  source 1..20: mol_type = other DNA
ccttggttaatattcaccag

SEQ ID NO: 61479 - DNA, 20 bp, synthetic construct
  misc_feature 1..20: note = chemically synthesized
  source 1..20: mol_type = other DNA
agcctcccccgttgcccctc

SEQ ID NO: 61480 - DNA, 20 bp, synthetic construct
  misc_feature 1..20: note = chemically synthesized
  source 1..20: mol_type = other DNA
ctggatccactgcttaaata

SEQ ID NO: 61481 - DNA, 20 bp, synthetic construct
  misc_feature 1..20: note = chemically synthesized
  source 1..20: mol_type = other DNA
tccactgcttaaatacggac

SEQ ID NO: 61482 - DNA, 20 bp, synthetic construct
  misc_feature 1..20: note = chemically synthesized
  source 1..20: mol_type = other DNA
ccactgcttaaatacggacg

SEQ ID NO: 61483 - DNA, 20 bp, synthetic construct
  misc_feature 1..20: note = chemically synthesized
  source 1..20: mol_type = other DNA
tgcttaaatacggacgagga

SEQ ID NO: 61484 - DNA, 20 bp, synthetic construct
  misc_feature 1..20: note = chemically synthesized
  source 1..20: mol_type = other DNA
gcttaaatacggacgaggac

SEQ ID NO: 61485 - DNA, 20 bp, synthetic construct
  misc_feature 1..20: note = chemically synthesized
  source 1..20: mol_type = other DNA
cttaaatacggacgaggaca

SEQ ID NO: 61486 - DNA, 20 bp, synthetic construct
  misc_feature 1..20: note = chemically synthesized
  source 1..20: mol_type = other DNA
aggacagggccctgtctcct

SEQ ID NO: 61487 - DNA, 20 bp, synthetic construct
  misc_feature 1..20: note = chemically synthesized
  source 1..20: mol_type = other DNA
gggccctgtctcctcagctt

SEQ ID NO: 61488 - DNA, 20 bp, synthetic construct
  misc_feature 1..20: note = chemically synthesized
  source 1..20: mol_type = other DNA
ggccctgtctcctcagcttc

SEQ ID NO: 61489 - DNA, 20 bp, synthetic construct
  misc_feature 1..20: note = chemically synthesized
  source 1..20: mol_type = other DNA
ttcaggcaccaccactgacc

SEQ ID NO: 61490 - DNA, 20 bp, synthetic construct
  misc_feature 1..20: note = chemically synthesized
  source 1..20: mol_type = other DNA
tcaggcaccaccactgacct

SEQ ID NO: 61491 - DNA, 20 bp, synthetic construct
  misc_feature 1..20: note = chemically synthesized
  source 1..20: mol_type = other DNA
gcaccaccactgacctggga

SEQ ID NO: 61492 - DNA, 20 bp, synthetic construct
  misc_feature 1..20: note = chemically synthesized
  source 1..20: mol_type = other DNA
gacctgggacagtgaatcgt

SEQ ID NO: 61493 - DNA, 20 bp, synthetic construct
  misc_feature 1..20: note = chemically synthesized
  source 1..20: mol_type = other DNA
gtaagtatgcctttcactgc

SEQ ID NO: 61494 - DNA, 20 bp, synthetic construct
  misc_feature 1..20: note = chemically synthesized
  source 1..20: mol_type = other DNA
aagtatgcctttcactgcga

SEQ ID NO: 61495 - DNA, 20 bp, synthetic construct
  misc_feature 1..20: note = chemically synthesized
  source 1..20: mol_type = other DNA
agtatgcctttcactgcgag

SEQ ID NO: 61496 - DNA, 20 bp, synthetic construct
  misc_feature 1..20: note = chemically synthesized
  source 1..20: mol_type = other DNA
cctttcactgcgagaggttc

SEQ ID NO: 61497 - DNA, 20 bp, synthetic construct
  misc_feature 1..20: note = chemically synthesized
  source 1..20: mol_type = other DNA
tttcactgcgagaggttctg

SEQ ID NO: 61498 - DNA, 20 bp, synthetic construct
  misc_feature 1..20: note = chemically synthesized
  source 1..20: mol_type = other DNA
tcactgcgagaggttctgga

SEQ ID NO: 61499 - DNA, 20 bp, synthetic construct
  misc_feature 1..20: note = chemically synthesized
  source 1..20: mol_type = other DNA
cactgcgagaggttctggag

SEQ ID NO: 61500 - DNA, 20 bp, synthetic construct
  misc_feature 1..20: note = chemically synthesized
  source 1..20: mol_type = other DNA
gaggttctggagaggcttct

SEQ ID NO: 61501 - DNA, 20 bp, synthetic construct
  misc_feature 1..20: note = chemically synthesized
  source 1..20: mol_type = other DNA
agaggcttctgagctcccca

SEQ ID NO: 61502 - DNA, 20 bp, synthetic construct
  misc_feature 1..20: note = chemically synthesized
  source 1..20: mol_type = other DNA
cttctgagctccccatggcc

SEQ ID NO: 61503 - DNA, 20 bp, synthetic construct
  misc_feature 1..20: note = chemically synthesized
  source 1..20: mol_type = other DNA
ttctgagctccccatggccc

SEQ ID NO: 61504 - DNA, 20 bp, synthetic construct
  misc_feature 1..20: note = chemically synthesized
  source 1..20: mol_type = other DNA
tgagctccccatggcccagg

SEQ ID NO: 61505 - DNA, 20 bp, synthetic construct
  misc_feature 1..20: note = chemically synthesized
  source 1..20: mol_type = other DNA
gagctccccatggcccaggc

SEQ ID NO: 61506 - DNA, 20 bp, synthetic construct
  misc_feature 1..20: note = chemically synthesized
  source 1..20: mol_type = other DNA
ctccccatggcccaggcagg

SEQ ID NO: 61507 - DNA, 20 bp, synthetic construct
  misc_feature 1..20: note = chemically synthesized
  source 1..20: mol_type = other DNA
cccatggcccaggcaggcag

SEQ ID NO: 61508 - DNA, 20 bp, synthetic construct
  misc_feature 1..20: note = chemically synthesized
  source 1..20: mol_type = other DNA
ccatggcccaggcaggcagc

SEQ ID NO: 61509 - DNA, 20 bp, synthetic construct
  misc_feature 1..20: note = chemically synthesized
  source 1..20: mol_type = other DNA
gcccaggcaggcagcaggtc

SEQ ID NO: 61510 - DNA, 20 bp, synthetic construct
  misc_feature 1..20: note = chemically synthesized
  source 1..20: mol_type = other DNA
cccaggcaggcagcaggtct

SEQ ID NO: 61511 - DNA, 20 bp, synthetic construct
  misc_feature 1..20: note = chemically synthesized
  source 1..20: mol_type = other DNA
ccaggcaggcagcaggtctg

SEQ ID NO: 61512 - DNA, 20 bp, synthetic construct
  misc_feature 1..20: note = chemically synthesized
  source 1..20: mol_type = other DNA
ggcaggcagcaggtctgggg

SEQ ID NO: 61513 - DNA, 20 bp, synthetic construct
  misc_feature 1..20: note = chemically synthesized
  source 1..20: mol_type = other DNA
gcaggcagcaggtctggggc

SEQ ID NO: 61514 - DNA, 20 bp, synthetic construct
  misc_feature 1..20: note = chemically synthesized
  source 1..20: mol_type = other DNA
aggcagcaggtctggggcag

SEQ ID NO: 61515 - DNA, 20 bp, synthetic construct
  misc_feature 1..20: note = chemically synthesized
  source 1..20: mol_type = other DNA
ggcagcaggtctggggcagg

SEQ ID NO: 61516 - DNA, 20 bp, synthetic construct
  misc_feature 1..20: note = chemically synthesized
  source 1..20: mol_type = other DNA
gcagcaggtctggggcagga

SEQ ID NO: 61517 - DNA, 20 bp, synthetic construct
  misc_feature 1..20: note = chemically synthesized
  source 1..20: mol_type = other DNA
cagcaggtctggggcaggag

SEQ ID NO: 61518 - DNA, 20 bp, synthetic construct
  misc_feature 1..20: note = chemically synthesized
  source 1..20: mol_type = other DNA
agcaggtctggggcaggagg

SEQ ID NO: 61519 - DNA, 20 bp, synthetic construct
  misc_feature 1..20: note = chemically synthesized
  source 1..20: mol_type = other DNA
gcaggtctggggcaggaggg

SEQ ID NO: 61520 - DNA, 20 bp, synthetic construct
  misc_feature 1..20: note = chemically synthesized
  source 1..20: mol_type = other DNA
ctggggcaggaggggggttg

SEQ ID NO: 61521 - DNA, 20 bp, synthetic construct
  misc_feature 1..20: note = chemically synthesized
  source 1..20: mol_type = other DNA
ggggcaggaggggggttgtg

SEQ ID NO: 61522 - DNA, 20 bp, synthetic construct
  misc_feature 1..20: note = chemically synthesized
  source 1..20: mol_type = other DNA
gcaggaggggggttgtggag

SEQ ID NO: 61523 - DNA, 20 bp, synthetic construct
  misc_feature 1..20: note = chemically synthesized
  source 1..20: mol_type = other DNA
caggaggggggttgtggagt

SEQ ID NO: 61524 - DNA, 20 bp, synthetic construct
  misc_feature 1..20: note = chemically synthesized
  source 1..20: mol_type = other DNA
ggagtgggtatccgcctgct

SEQ ID NO: 61525 - DNA, 20 bp, synthetic construct
  misc_feature 1..20: note = chemically synthesized
  source 1..20: mol_type = other DNA
gagtgggtatccgcctgctg

SEQ ID NO: 61526 - DNA, 20 bp, synthetic construct
  misc_feature 1..20: note = chemically synthesized
  source 1..20: mol_type = other DNA
ggtatccgcctgctgaggtg

SEQ ID NO: 61527 - DNA, 20 bp, synthetic construct
  misc_feature 1..20: note = chemically synthesized
  source 1..20: mol_type = other DNA
gtatccgcctgctgaggtgc

SEQ ID NO: 61528 - DNA, 20 bp, synthetic construct
  misc_feature 1..20: note = chemically synthesized
  source 1..20: mol_type = other DNA
tatccgcctgctgaggtgca

SEQ ID NO: 61529 - DNA, 20 bp, synthetic construct
  misc_feature 1..20: note = chemically synthesized
  source 1..20: mol_type = other DNA
ccgcctgctgaggtgcaggg

SEQ ID NO: 61530 - DNA, 20 bp, synthetic construct
  misc_feature 1..20: note = chemically synthesized
  source 1..20: mol_type = other DNA
ctgctgaggtgcagggcaga

SEQ ID NO: 61531 - DNA, 20 bp, synthetic construct
  misc_feature 1..20: note = chemically synthesized
  source 1..20: mol_type = other DNA
gctgaggtgcagggcagatg

SEQ ID NO: 61532 - DNA, 20 bp, synthetic construct
  misc_feature 1..20: note = chemically synthesized
  source 1..20: mol_type = other DNA
tgaggtgcagggcagatgga

SEQ ID NO: 61533 - DNA, 20 bp, synthetic construct
  misc_feature 1..20: note = chemically synthesized
  source 1..20: mol_type = other DNA
gaggtgcagggcagatggag

SEQ ID NO: 61534 - DNA, 20 bp, synthetic construct
  misc_feature 1..20: note = chemically synthesized
  source 1..20: mol_type = other DNA
cagggcagatggagaggctg

SEQ ID NO: 61535 - DNA, 20 bp, synthetic construct
  misc_feature 1..20: note = chemically synthesized
  source 1..20: mol_type = other DNA
cagatggagaggctgcagct

SEQ ID NO: 61536 - DNA, 20 bp, synthetic construct
  misc_feature 1..20: note = chemically synthesized
  source 1..20: mol_type = other DNA
agctcctattttcataataa

SEQ ID NO: 61537 - DNA, 20 bp, synthetic construct
  misc_feature 1..20: note = chemically synthesized
  source 1..20: mol_type = other DNA
tcctattttcataataacag

SEQ ID NO: 61538 - DNA, 20 bp, synthetic construct
  misc_feature 1..20: note = chemically synthesized
  source 1..20: mol_type = other DNA
ttcataataacagcagccat

SEQ ID NO: 61539 - DNA, 20 bp, synthetic construct
  misc_feature 1..20: note = chemically synthesized
  source 1..20: mol_type = other DNA
tcataataacagcagccatg

SEQ ID NO: 61540 - DNA, 20 bp, synthetic construct
  misc_feature 1..20: note = chemically synthesized
  source 1..20: mol_type = other DNA
cataataacagcagccatga

SEQ ID NO: 61541 - DNA, 20 bp, synthetic construct
  misc_feature 1..20: note = chemically synthesized
  source 1..20: mol_type = other DNA
gagggttgtgtcctgtttcc

SEQ ID NO: 61542 - DNA, 20 bp, synthetic construct
  misc_feature 1..20: note = chemically synthesized
  source 1..20: mol_type = other DNA
tcctgtttcccagtcctgcc

SEQ ID NO: 61543 - DNA, 20 bp, synthetic construct
  misc_feature 1..20: note = chemically synthesized
  source 1..20: mol_type = other DNA
agtcctgcccggtcccccct

SEQ ID NO: 61544 - DNA, 20 bp, synthetic construct
  misc_feature 1..20: note = chemically synthesized
  source 1..20: mol_type = other DNA
ggtcccccctcggtacctcc

SEQ ID NO: 61545 - DNA, 20 bp, synthetic construct
  misc_feature 1..20: note = chemically synthesized
  source 1..20: mol_type = other DNA
cccccctcggtacctcctgg

SEQ ID NO: 61546 - DNA, 20 bp, synthetic construct
  misc_feature 1..20: note = chemically synthesized
  source 1..20: mol_type = other DNA
gtacctcctggtggatacac

SEQ ID NO: 61547 - DNA, 20 bp, synthetic construct
  misc_feature 1..20: note = chemically synthesized
  source 1..20: mol_type = other DNA
gtggatacactggttcctgt

SEQ ID NO: 61548 - DNA, 20 bp, synthetic construct
  misc_feature 1..20: note = chemically synthesized
  source 1..20: mol_type = other DNA
gatacactggttcctgtaag

SEQ ID NO: 61549 - DNA, 20 bp, synthetic construct
  misc_feature 1..20: note = chemically synthesized
  source 1..20: mol_type = other DNA
acactggttcctgtaagcag

SEQ ID NO: 61550 - DNA, 20 bp, synthetic construct
  misc_feature 1..20: note = chemically synthesized
  source 1..20: mol_type = other DNA
ctggttcctgtaagcagaag

SEQ ID NO: 61551 - DNA, 20 bp, synthetic construct
  misc_feature 1..20: note = chemically synthesized
  source 1..20: mol_type = other DNA
tcctgtaagcagaagtggat

SEQ ID NO: 61552 - DNA, 20 bp, synthetic construct
  misc_feature 1..20: note = chemically synthesized
  source 1..20: mol_type = other DNA
cctgtaagcagaagtggatg

SEQ ID NO: 61553 - DNA, 20 bp, synthetic construct
  misc_feature 1..20: note = chemically synthesized
  source 1..20: mol_type = other DNA
ctgtaagcagaagtggatga

SEQ ID NO: 61554 - DNA, 20 bp, synthetic construct
  misc_feature 1..20: note = chemically synthesized
  source 1..20: mol_type = other DNA
cagaagtggatgagggtgtc

SEQ ID NO: 61555 - DNA, 20 bp, synthetic construct
  misc_feature 1..20: note = chemically synthesized
  source 1..20: mol_type = other DNA
agaagtggatgagggtgtct

SEQ ID NO: 61556 - DNA, 20 bp, synthetic construct
  misc_feature 1..20: note = chemically synthesized
  source 1..20: mol_type = other DNA
gatgagggtgtctaggtctg

SEQ ID NO: 61557 - DNA, 20 bp, synthetic construct
  misc_feature 1..20: note = chemically synthesized
  source 1..20: mol_type = other DNA
ggtgtctaggtctgcagtcc

SEQ ID NO: 61558 - DNA, 20 bp, synthetic construct
  misc_feature 1..20: note = chemically synthesized
  source 1..20: mol_type = other DNA
ggtctgcagtcctggcaccc

SEQ ID NO: 61559 - DNA, 20 bp, synthetic construct
  misc_feature 1..20: note = chemically synthesized
  source 1..20: mol_type = other DNA
gtctgcagtcctggcacccc

SEQ ID NO: 61560 - DNA, 20 bp, synthetic construct
  misc_feature 1..20: note = chemically synthesized
  source 1..20: mol_type = other DNA
gcagtcctggcaccccagga

SEQ ID NO: 61561 - DNA, 20 bp, synthetic construct
  misc_feature 1..20: note = chemically synthesized
  source 1..20: mol_type = other DNA
cagtcctggcaccccaggat

SEQ ID NO: 61562 - DNA, 20 bp, synthetic construct
  misc_feature 1..20: note = chemically synthesized
  source 1..20: mol_type = other DNA
agtcctggcaccccaggatg

SEQ ID NO: 61563 - DNA, 20 bp, synthetic construct
  misc_feature 1..20: note = chemically synthesized
  source 1..20: mol_type = other DNA
gtcctggcaccccaggatgg

SEQ ID NO: 61564 - DNA, 20 bp, synthetic construct
  misc_feature 1..20: note = chemically synthesized
  source 1..20: mol_type = other DNA
caccccaggatgggggacac

SEQ ID NO: 61565 - DNA, 20 bp, synthetic construct
  misc_feature 1..20: note = chemically synthesized
  source 1..20: mol_type = other DNA
caggatgggggacaccagcc

SEQ ID NO: 61566 - DNA, 20 bp, synthetic construct
  misc_feature 1..20: note = chemically synthesized
  source 1..20: mol_type = other DNA
gggggacaccagccaagata

SEQ ID NO: 61567 - DNA, 20 bp, synthetic construct
  misc_feature 1..20: note = chemically synthesized
  source 1..20: mol_type = other DNA
caccagccaagatacagcaa

SEQ ID NO: 61568 - DNA, 20 bp, synthetic construct
  misc_feature 1..20: note = chemically synthesized
  source 1..20: mol_type = other DNA
aagatacagcaacagcaaca

SEQ ID NO: 61569 - DNA, 20 bp, synthetic construct
  misc_feature 1..20: note = chemically synthesized
  source 1..20: mol_type = other DNA
acagcaacagcaacaaagcg

SEQ ID NO: 61570 - DNA, 20 bp, synthetic construct
  misc_feature 1..20: note = chemically synthesized
  source 1..20: mol_type = other DNA
gccatttctttctgtttgca

SEQ ID NO: 61571 - DNA, 20 bp, synthetic construct
  misc_feature 1..20: note = chemically synthesized
  source 1..20: mol_type = other DNA
tgcacagctcctctgtctgt

SEQ ID NO: 61572 - DNA, 20 bp, synthetic construct
  misc_feature 1..20: note = chemically synthesized
  source 1..20: mol_type = other DNA
gcacagctcctctgtctgtc

SEQ ID NO: 61573 - DNA, 20 bp, synthetic construct
  misc_feature 1..20: note = chemically synthesized
  source 1..20: mol_type = other DNA
cacagctcctctgtctgtcg

SEQ ID NO: 61574 - DNA, 20 bp, synthetic construct
  misc_feature 1..20: note = chemically synthesized
  source 1..20: mol_type = other DNA
acagctcctctgtctgtcgg

SEQ ID NO: 61575 - DNA, 20 bp, synthetic construct
  misc_feature 1..20: note = chemically synthesized
  source 1..20: mol_type = other DNA
tcctgtctgttgtctcctat

SEQ ID NO: 61576 - DNA, 20 bp, synthetic construct
  misc_feature 1..20: note = chemically synthesized
  source 1..20: mol_type = other DNA
tcaccacctctcctactgct

SEQ ID NO: 61577 - DNA, 20 bp, synthetic construct
  misc_feature 1..20: note = chemically synthesized
  source 1..20: mol_type = other DNA
caccacctctcctactgctt

SEQ ID NO: 61578 - DNA, 20 bp, synthetic construct
  misc_feature 1..20: note = chemically synthesized
  source 1..20: mol_type = other DNA
tgcatctttctccccttcta

SEQ ID NO: 61579 - DNA, 20 bp, synthetic construct
  misc_feature 1..20: note = chemically synthesized
  source 1..20: mol_type = other DNA
ctttctccccttctatagat

SEQ ID NO: 61580 - DNA, 20 bp, synthetic construct
  misc_feature 1..20: note = chemically synthesized
  source 1..20: mol_type = other DNA
tttctccccttctatagatg

SEQ ID NO: 61581 - DNA, 20 bp, synthetic construct
  misc_feature 1..20: note = chemically synthesized
  source 1..20: mol_type = other DNA
tctccccttctatagatgag

SEQ ID NO: 61582 - DNA, 20 bp, synthetic construct
  misc_feature 1..20: note = chemically synthesized
  source 1..20: mol_type = other DNA
ctccccttctatagatgagg

SEQ ID NO: 61583 - DNA, 20 bp, synthetic construct
  misc_feature 1..20: note = chemically synthesized
  source 1..20: mol_type = other DNA
cttctatagatgaggaggtt

SEQ ID NO: 61584 - DNA, 20 bp, synthetic construct
  misc_feature 1..20: note = chemically synthesized
  source 1..20: mol_type = other DNA
ttctatagatgaggaggtta

SEQ ID NO: 61585 - DNA, 20 bp, synthetic construct
  misc_feature 1..20: note = chemically synthesized
  source 1..20: mol_type = other DNA
tagatgaggaggttaaggtc

SEQ ID NO: 61586 - DNA, 20 bp, synthetic construct
  misc_feature 1..20: note = chemically synthesized
  source 1..20: mol_type = other DNA
gatgaggaggttaaggtcca

SEQ ID NO: 61587 - DNA, 20 bp, synthetic construct
  misc_feature 1..20: note = chemically synthesized
  source 1..20: mol_type = other DNA
tgaggaggttaaggtccaga

SEQ ID NO: 61588 - DNA, 20 bp, synthetic construct
  misc_feature 1..20: note = chemically synthesized
  source 1..20: mol_type = other DNA
gaggaggttaaggtccagag

SEQ ID NO: 61589 - DNA, 20 bp, synthetic construct
  misc_feature 1..20: note = chemically synthesized
  source 1..20: mol_type = other DNA
aggaggttaaggtccagaga

SEQ ID NO: 61590 - DNA, 20 bp, synthetic construct
  misc_feature 1..20: note = chemically synthesized
  source 1..20: mol_type = other DNA
ggaggttaaggtccagagag

SEQ ID NO: 61591 - DNA, 20 bp, synthetic construct
  misc_feature 1..20: note = chemically synthesized
  source 1..20: mol_type = other DNA
ggttaaggtccagagagggg

SEQ ID NO: 61592 - DNA, 20 bp, synthetic construct
  misc_feature 1..20: note = chemically synthesized
  source 1..20: mol_type = other DNA
gttaaggtccagagaggggt

SEQ ID NO: 61593 - DNA, 20 bp, synthetic construct
  misc_feature 1..20: note = chemically synthesized
  source 1..20: mol_type = other DNA
ttaaggtccagagaggggtg

SEQ ID NO: 61594 - DNA, 20 bp, synthetic construct
  misc_feature 1..20: note = chemically synthesized
  source 1..20: mol_type = other DNA
aaggtccagagaggggtggg

SEQ ID NO: 61595 - DNA, 20 bp, synthetic construct
  misc_feature 1..20: note = chemically synthesized
  source 1..20: mol_type = other DNA
aggtccagagaggggtgggg

SEQ ID NO: 61596 - DNA, 20 bp, synthetic construct
  misc_feature 1..20: note = chemically synthesized
  source 1..20: mol_type = other DNA
agaggggtggggaggaacgc

SEQ ID NO: 61597 - DNA, 20 bp, synthetic construct
  misc_feature 1..20: note = chemically synthesized
  source 1..20: mol_type = other DNA
ctcacattctccatcccctc

SEQ ID NO: 61598 - DNA, 20 bp, synthetic construct
  misc_feature 1..20: note = chemically synthesized
  source 1..20: mol_type = other DNA
ccatcccctccagatatgac

SEQ ID NO: 61599 - DNA, 20 bp, synthetic construct
  misc_feature 1..20: note = chemically synthesized
  source 1..20: mol_type = other DNA
catcccctccagatatgacc

SEQ ID NO: 61600 - DNA, 20 bp, synthetic construct
  misc_feature 1..20: note = chemically synthesized
  source 1..20: mol_type = other DNA
cctccagatatgaccaggaa

SEQ ID NO: 61601 - DNA, 20 bp, synthetic construct
  misc_feature 1..20: note = chemically synthesized
  source 1..20: mol_type = other DNA
gaccaggaacagacctgtgc

SEQ ID NO: 61602 - DNA, 20 bp, synthetic construct
  misc_feature 1..20: note = chemically synthesized
  source 1..20: mol_type = other DNA
accaggaacagacctgtgcc

SEQ ID NO: 61603 - DNA, 20 bp, synthetic construct
  misc_feature 1..20: note = chemically synthesized
  source 1..20: mol_type = other DNA
aacagacctgtgccaggcct

SEQ ID NO: 61604 - DNA, 20 bp, synthetic construct
  misc_feature 1..20: note = chemically synthesized
  source 1..20: mol_type = other DNA
tgttcctggtcatatctgga

SEQ ID NO: 61605 - DNA, 20 bp, synthetic construct
  misc_feature 1..20: note = chemically synthesized
  source 1..20: mol_type = other DNA
ggtcatatctggaggggatg

SEQ ID NO: 61606 - DNA, 20 bp, synthetic construct
  misc_feature 1..20: note = chemically synthesized
  source 1..20: mol_type = other DNA
ttggctggtgtcccccatcc

SEQ ID NO: 61607 - DNA, 20 bp, synthetic construct
  misc_feature 1..20: note = chemically synthesized
  source 1..20: mol_type = other DNA
tctgccctgcacctcagcag

SEQ ID NO: 61608 - DNA, 20 bp, synthetic construct
  misc_feature 1..20: note = chemically synthesized
  source 1..20: mol_type = other DNA
tcctcgtccgtatttaagca

SEQ ID NO: 61609 - DNA, 20 bp, synthetic construct
  misc_feature 1..20: note = chemically synthesized
  source 1..20: mol_type = other DNA
ggcaacgggggaggctgctg

SEQ ID NO: 61610 - DNA, 20 bp, synthetic construct
  misc_feature 1..20: note = chemically synthesized
  source 1..20: mol_type = other DNA
caggggctaagtccactggc

SEQ ID NO: 61611 - DNA, 20 bp, synthetic construct
  misc_feature 1..20: note = chemically synthesized
  source 1..20: mol_type = other DNA
ctaagtccactggctgggat

SEQ ID NO: 61612 - DNA, 20 bp, synthetic construct
  misc_feature 1..20: note = chemically synthesized
  source 1..20: mol_type = other DNA
cttccactgcacttaccgaa

SEQ ID NO: 61613 - DNA, 20 bp, synthetic construct
  misc_feature 1..20: note = chemically synthesized
  source 1..20: mol_type = other DNA
cgtcctgtgtccaaggtgga

SEQ ID NO: 61614 - DNA, 20 bp, synthetic construct
  misc_feature 1..20: note = chemically synthesized
  source 1..20: mol_type = other DNA
tccaaggtggagggggtggc

SEQ ID NO: 61615 - DNA, 20 bp, synthetic construct
  misc_feature 1..20: note = chemically synthesized
  source 1..20: mol_type = other DNA
gtgagtcagacagtctctgg

SEQ ID NO: 61616 - DNA, 20 bp, synthetic construct
  misc_feature 1..20: note = chemically synthesized
  source 1..20: mol_type = other DNA
ctggccctctgctctcactg

SEQ ID NO: 61617 - DNA, 20 bp, synthetic construct
  misc_feature 1..20: note = chemically synthesized
  source 1..20: mol_type = other DNA
gtagcaagatctaccattta

SEQ ID NO: 61618 - DNA, 20 bp, synthetic construct
  misc_feature 1..20: note = chemically synthesized
  source 1..20: mol_type = other DNA
ttactgccgccctgggagat

SEQ ID NO: 61619 - DNA, 20 bp, synthetic construct
  misc_feature 1..20: note = chemically synthesized
  source 1..20: mol_type = other DNA
tgccgccctgggagatcaga

SEQ ID NO: 61620 - DNA, 20 bp, synthetic construct
  misc_feature 1..20: note = chemically synthesized
  source 1..20: mol_type = other DNA
tggcatggggggccgtgaga

SEQ ID NO: 61621 - DNA, 20 bp, synthetic construct
  misc_feature 1..20: note = chemically synthesized
  source 1..20: mol_type = other DNA
actgtttcacctgcatccca

SEQ ID NO: 61622 - DNA, 20 bp, synthetic construct
  misc_feature 1..20: note = chemically synthesized
  source 1..20: mol_type = other DNA
aagcatgcttgtgaagtgcc

SEQ ID NO: 61623 - DNA, 20 bp, synthetic construct
  misc_feature 1..20: note = chemically synthesized
  source 1..20: mol_type = other DNA
gcacacagtaggctctttat

SEQ ID NO: 61624 - DNA, 20 bp, synthetic construct
  misc_feature 1..20: note = chemically synthesized
  source 1..20: mol_type = other DNA
agtgtgatccgtatacagct

SEQ ID NO: 61625 - DNA, 20 bp, synthetic construct
  misc_feature 1..20: note = chemically synthesized
  source 1..20: mol_type = other DNA
gtatacagcttggagtttct

SEQ ID NO: 61626 - DNA, 20 bp, synthetic construct
  misc_feature 1..20: note = chemically synthesized
  source 1..20: mol_type = other DNA
tggatacatggcccccactc

SEQ ID NO: 61627 - DNA, 20 bp, synthetic construct
  misc_feature 1..20: note = chemically synthesized
  source 1..20: mol_type = other DNA
ggaggcctttggagactgct

SEQ ID NO: 61628 - DNA, 20 bp, synthetic construct
  misc_feature 1..20: note = chemically synthesized
  source 1..20: mol_type = other DNA
ggtggaggggaggggaggta

SEQ ID NO: 61629 - DNA, 20 bp, synthetic construct
  misc_feature 1..20: note = chemically synthesized
  source 1..20: mol_type = other DNA
gtacgtgccgtagatacttg

SEQ ID NO: 61630 - DNA, 20 bp, synthetic construct
  misc_feature 1..20: note = chemically synthesized
  source 1..20: mol_type = other DNA
gtgccgtagatacttgcaga

SEQ ID NO: 61631 - DNA, 20 bp, synthetic construct
  misc_feature 1..20: note = chemically synthesized
  source 1..20: mol_type = other DNA
cgtagatacttgcagagtga

SEQ ID NO: 61632 - DNA, 20 bp, synthetic construct
  misc_feature 1..20: note = chemically synthesized
  source 1..20: mol_type = other DNA
gatacttgcagagtgaatgg

SEQ ID NO: 61633 - DNA, 20 bp, synthetic construct
  misc_feature 1..20: note = chemically synthesized
  source 1..20: mol_type = other DNA
ccaccttggggctctaccag

SEQ ID NO: 61634 - DNA, 20 bp, synthetic construct
  misc_feature 1..20: note = chemically synthesized
  source 1..20: mol_type = other DNA
tctaccaggcgagtgaccca

SEQ ID NO: 61635 - DNA, 20 bp, synthetic construct
  misc_feature 1..20: note = chemically synthesized
  source 1..20: mol_type = other DNA
tactggctgtgaggcctcag

SEQ ID NO: 61636 - DNA, 20 bp, synthetic construct
  misc_feature 1..20: note = chemically synthesized
  source 1..20: mol_type = other DNA
aatttccctatctgtaaaat

SEQ ID NO: 61637 - DNA, 20 bp, synthetic construct
  misc_feature 1..20: note = chemically synthesized
  source 1..20: mol_type = other DNA
gtaccttgttgagctgctgt

SEQ ID NO: 61638 - DNA, 20 bp, synthetic construct
  misc_feature 1..20: note = chemically synthesized
  source 1..20: mol_type = other DNA
agttcaaggaaagctcagag

SEQ ID NO: 61639 - DNA, 20 bp, synthetic construct
  misc_feature 1..20: note = chemically synthesized
  source 1..20: mol_type = other DNA
ggaaagctcagagacgggta

SEQ ID NO: 61640 - DNA, 20 bp, synthetic construct
  misc_feature 1..20: note = chemically synthesized
  source 1..20: mol_type = other DNA
gtgtcaggggctggtgtcac

SEQ ID NO: 61641 - DNA, 20 bp, synthetic construct
  misc_feature 1..20: note = chemically synthesized
  source 1..20: mol_type = other DNA
aggggctggtgtcactgggg

SEQ ID NO: 61642 - DNA, 20 bp, synthetic construct
  misc_feature 1..20: note = chemically synthesized
  source 1..20: mol_type = other DNA
tcattcagttaccctgtgaa

SEQ ID NO: 61643 - DNA, 20 bp, synthetic construct
  misc_feature 1..20: note = chemically synthesized
  source 1..20: mol_type = other DNA
ctgtccttcccctgagctgg

SEQ ID NO: 61644 - DNA, 20 bp, synthetic construct
  misc_feature 1..20: note = chemically synthesized
  source 1..20: mol_type = other DNA
ccttcccctgagctggctga

SEQ ID NO: 61645 - DNA, 20 bp, synthetic construct
  misc_feature 1..20: note = chemically synthesized
  source 1..20: mol_type = other DNA
tgtccctcccacctgtggaa

SEQ ID NO: 61646 - DNA, 20 bp, synthetic construct
  misc_feature 1..20: note = chemically synthesized
  source 1..20: mol_type = other DNA
gtctcttctggcaggcacag

SEQ ID NO: 61647 - DNA, 20 bp, synthetic construct
  misc_feature 1..20: note = chemically synthesized
  source 1..20: mol_type = other DNA
aggttgccgcccctccaacc

SEQ ID NO: 61648 - DNA, 20 bp, synthetic construct
  misc_feature 1..20: note = chemically synthesized
  source 1..20: mol_type = other DNA
ttggttcagctcaggactct

SEQ ID NO: 61649 - DNA, 20 bp, synthetic construct
  misc_feature 1..20: note = chemically synthesized
  source 1..20: mol_type = other DNA
gcccacccaggaagtagact

SEQ ID NO: 61650 - DNA, 20 bp, synthetic construct
  misc_feature 1..20: note = chemically synthesized
  source 1..20: mol_type = other DNA
ggacaagtcaccctctccct

SEQ ID NO: 61651 - DNA, 20 bp, synthetic construct
  misc_feature 1..20: note = chemically synthesized
  source 1..20: mol_type = other DNA
aggtacagtcacactgccca

SEQ ID NO: 61652 - DNA, 20 bp, synthetic construct
  misc_feature 1..20: note = chemically synthesized
  source 1..20: mol_type = other DNA
cttgcggcaactcaaaggga

SEQ ID NO: 61653 - DNA, 20 bp, synthetic construct
  misc_feature 1..20: note = chemically synthesized
  source 1..20: mol_type = other DNA
aagggagagggtgacttgtc

SEQ ID NO: 61654 - DNA, 20 bp, synthetic construct
  misc_feature 1..20: note = chemically synthesized
  source 1..20: mol_type = other DNA
caggtgacatgccgggctgt

SEQ ID NO: 61655 - DNA, 20 bp, synthetic construct
  misc_feature 1..20: note = chemically synthesized
  source 1..20: mol_type = other DNA
ctccacccgaagtctacttc

SEQ ID NO: 61656 - DNA, 20 bp, synthetic construct
  misc_feature 1..20: note = chemically synthesized
  source 1..20: mol_type = other DNA
tgcctccacgcagcaaccct

SEQ ID NO: 61657 - DNA, 20 bp, synthetic construct
  misc_feature 1..20: note = chemically synthesized
  source 1..20: mol_type = other DNA
agctgaaccaagaaggagga

SEQ ID NO: 61658 - DNA, 20 bp, synthetic construct
  misc_feature 1..20: note = chemically synthesized
  source 1..20: mol_type = other DNA
gcctagccgctgctgctgcc

SEQ ID NO: 61659 - DNA, 20 bp, synthetic construct
  misc_feature 1..20: note = chemically synthesized
  source 1..20: mol_type = other DNA
gtgggagggacagcagggct

SEQ ID NO: 61660 - DNA, 20 bp, synthetic construct
  misc_feature 1..20: note = chemically synthesized
  source 1..20: mol_type = other DNA
gggacagcagggcttagagt

SEQ ID NO: 61661 - DNA, 20 bp, synthetic construct
  misc_feature 1..20: note = chemically synthesized
  source 1..20: mol_type = other DNA
cacagcccagtgctggagct

SEQ ID NO: 61662 - DNA, 20 bp, synthetic construct
  misc_feature 1..20: note = chemically synthesized
  source 1..20: mol_type = other DNA
gcccagtgctggagctgtga

SEQ ID NO: 61663 - DNA, 20 bp, synthetic construct
  misc_feature 1..20: note = chemically synthesized
  source 1..20: mol_type = other DNA
tgtgagtggatgtagagcag

SEQ ID NO: 61664 - DNA, 20 bp, synthetic construct
  misc_feature 1..20: note = chemically synthesized
  source 1..20: mol_type = other DNA
ggacaggggccctgaagcca

SEQ ID NO: 61665 - DNA, 20 bp, synthetic construct
  misc_feature 1..20: note = chemically synthesized
  source 1..20: mol_type = other DNA
gagctcagagagaaggggag

SEQ ID NO: 61666 - DNA, 20 bp, synthetic construct
  misc_feature 1..20: note = chemically synthesized
  source 1..20: mol_type = other DNA
agtttcccgctgcctgaaag

SEQ ID NO: 61667 - DNA, 20 bp, synthetic construct
  misc_feature 1..20: note = chemically synthesized
  source 1..20: mol_type = other DNA
ggtggtacctactcccttca

SEQ ID NO: 61668 - DNA, 20 bp, synthetic construct
  misc_feature 1..20: note = chemically synthesized
  source 1..20: mol_type = other DNA
ctactcccttcacagggtaa

SEQ ID NO: 61669 - DNA, 20 bp, synthetic construct
  misc_feature 1..20: note = chemically synthesized
  source 1..20: mol_type = other DNA
tgaggcctcacagccagtaa

SEQ ID NO: 61670 - DNA, 20 bp, synthetic construct
  misc_feature 1..20: note = chemically synthesized
  source 1..20: mol_type = other DNA
cagtaagtgggttccctggt

SEQ ID NO: 61671 - DNA, 20 bp, synthetic construct
  misc_feature 1..20: note = chemically synthesized
  source 1..20: mol_type = other DNA
tggtctgaatgtgtgtgctg

SEQ ID NO: 61672 - DNA, 20 bp, synthetic construct
  misc_feature 1..20: note = chemically synthesized
  source 1..20: mol_type = other DNA
tgtgtgtgctggaggatcct

SEQ ID NO: 61673 - DNA, 20 bp, synthetic construct
  misc_feature 1..20: note = chemically synthesized
  source 1..20: mol_type = other DNA
tggaggcataaatgggactg

SEQ ID NO: 61674 - DNA, 20 bp, synthetic construct
  misc_feature 1..20: note = chemically synthesized
  source 1..20: mol_type = other DNA
gccagctcccaagcaggttt

SEQ ID NO: 61675 - DNA, 20 bp, synthetic construct
  misc_feature 1..20: note = chemically synthesized
  source 1..20: mol_type = other DNA
aatctgatttaggcttttaa

SEQ ID NO: 61676 - DNA, 20 bp, synthetic construct
  misc_feature 1..20: note = chemically synthesized
  source 1..20: mol_type = other DNA
ccaaaggcctccaacaaccc

SEQ ID NO: 61677 - DNA, 20 bp, synthetic construct
  misc_feature 1..20: note = chemically synthesized
  source 1..20: mol_type = other DNA
aaagaaactccaagctgtat

SEQ ID NO: 61678 - DNA, 20 bp, synthetic construct
  misc_feature 1..20: note = chemically synthesized
  source 1..20: mol_type = other DNA
ggcacttcacaagcatgctt

SEQ ID NO: 61679 - DNA, 20 bp, synthetic construct
  misc_feature 1..20: note = chemically synthesized
  source 1..20: mol_type = other DNA
gaatgaaacttccaactctt

SEQ ID NO: 61680 - DNA, 20 bp, synthetic construct
  misc_feature 1..20: note = chemically synthesized
  source 1..20: mol_type = other DNA
ttttccatcgggaccatcaa

SEQ ID NO: 61681 - DNA, 20 bp, synthetic construct
  misc_feature 1..20: note = chemically synthesized
  source 1..20: mol_type = other DNA
gtgtttgtgtctaaggctga

SEQ ID NO: 61682 - DNA, 20 bp, synthetic construct
  misc_feature 1..20: note = chemically synthesized
  source 1..20: mol_type = other DNA
ctaaggctgactgggtaact

SEQ ID NO: 61683 - DNA, 20 bp, synthetic construct
  misc_feature 1..20: note = chemically synthesized
  source 1..20: mol_type = other DNA
gtcttcagcatcaggcattt

SEQ ID NO: 61684 - DNA, 20 bp, synthetic construct
  misc_feature 1..20: note = chemically synthesized
  source 1..20: mol_type = other DNA
ctaccagtggaacagccact

SEQ ID NO: 61685 - DNA, 20 bp, synthetic construct
  misc_feature 1..20: note = chemically synthesized
  source 1..20: mol_type = other DNA
ctgtttgctcctccgataac

SEQ ID NO: 61686 - DNA, 20 bp, synthetic construct
  misc_feature 1..20: note = chemically synthesized
  source 1..20: mol_type = other DNA
cagcctcccccgttgcccct

SEQ ID NO: 61687 - DNA, 20 bp, synthetic construct
  misc_feature 1..20: note = chemically synthesized
  source 1..20: mol_type = other DNA
accaccactgacctgggaca

SEQ ID NO: 61688 - DNA, 20 bp, synthetic construct
  misc_feature 1..20: note = chemically synthesized
  source 1..20: mol_type = other DNA
cagcaggtctggggcaggag

SEQ ID NO: 61689 - DNA, 20 bp, synthetic construct
  misc_feature 1..20: note = chemically synthesized
  source 1..20: mol_type = other DNA
ctggggcaggaggggggttg

SEQ ID NO: 61690 - DNA, 20 bp, synthetic construct
  misc_feature 1..20: note = chemically synthesized
  source 1..20: mol_type = other DNA
ggcaggaggggggttgtgga

SEQ ID NO: 61691 - DNA, 20 bp, synthetic construct
  misc_feature 1..20: note = chemically synthesized
  source 1..20: mol_type = other DNA
ttcataataacagcagccat

SEQ ID NO: 61692 - DNA, 20 bp, synthetic construct
  misc_feature 1..20: note = chemically synthesized
  source 1..20: mol_type = other DNA
tcccccctcggtacctcctg

SEQ ID NO: 61693 - DNA, 20 bp, synthetic construct
  misc_feature 1..20: note = chemically synthesized
  source 1..20: mol_type = other DNA
actggttcctgtaagcagaa

SEQ ID NO: 61694 - DNA, 20 bp, synthetic construct
  misc_feature 1..20: note = chemically synthesized
  source 1..20: mol_type = other DNA
tcctgtaagcagaagtggat

SEQ ID NO: 61695 - DNA, 20 bp, synthetic construct
  misc_feature 1..20: note = chemically synthesized
  source 1..20: mol_type = other DNA
ggtctgcagtcctggcaccc

SEQ ID NO: 61696 - DNA, 20 bp, synthetic construct
  misc_feature 1..20: note = chemically synthesized
  source 1..20: mol_type = other DNA
gaggaggttaaggtccagag

SEQ ID NO: 61697 - DNA, 20 bp, synthetic construct
  misc_feature 1..20: note = chemically synthesized
  source 1..20: mol_type = other DNA
tggtcatatctggaggggat

SEQ ID NO: 61698 - DNA, 20 bp, synthetic construct
  misc_feature 1..20: note = chemically synthesized
  source 1..20: mol_type = other DNA
acctcctcatctatagaagg

SEQ ID NO: 61699 - DNA, 20 bp, synthetic construct
  misc_feature 1..20: note = chemically synthesized
  source 1..20: mol_type = other DNA
cagacagaggagctgtgcaa

SEQ ID NO: 61700 - DNA, 20 bp, synthetic construct
  misc_feature 1..20: note = chemically synthesized
  source 1..20: mol_type = other DNA
cagaggagctgtgcaaacag

SEQ ID NO: 61701 - DNA, 20 bp, synthetic construct
  misc_feature 1..20: note = chemically synthesized
  source 1..20: mol_type = other DNA
aaggagtcattgtacctggc

SEQ ID NO: 61702 - DNA, 20 bp, synthetic construct
  misc_feature 1..20: note = chemically synthesized
  source 1..20: mol_type = other DNA
gctggccctctgctctcact

SEQ ID NO: 61703 - DNA, 20 bp, synthetic construct
  misc_feature 1..20: note = chemically synthesized
  source 1..20: mol_type = other DNA
gagacgggtactgggtgtgc

SEQ ID NO: 61704 - DNA, 20 bp, synthetic construct
  misc_feature 1..20: note = chemically synthesized
  source 1..20: mol_type = other DNA
tcacactgcccagaggatta

SEQ ID NO: 61705 - DNA, 20 bp, synthetic construct
  misc_feature 1..20: note = chemically synthesized
  source 1..20: mol_type = other DNA
tcttccctctgcagctggcc

SEQ ID NO: 61706 - DNA, 20 bp, synthetic construct
  misc_feature 1..20: note = chemically synthesized
  source 1..20: mol_type = other DNA
aaacaaaggcccagagaggg

SEQ ID NO: 61707 - DNA, 20 bp, synthetic construct
  misc_feature 1..20: note = chemically synthesized
  source 1..20: mol_type = other DNA
agagtgggggccatgtatcc

SEQ ID NO: 61708 - DNA, 20 bp, synthetic construct
  misc_feature 1..20: note = chemically synthesized
  source 1..20: mol_type = other DNA
ctggttttccaggagcaaaa

SEQ ID NO: 61709 - DNA, 20 bp, synthetic construct
  misc_feature 1..20: note = chemically synthesized
  source 1..20: mol_type = other DNA
tgtttctgtttttgctcctg

SEQ ID NO: 61710 - DNA, 20 bp, synthetic construct
  misc_feature 1..20: note = chemically synthesized
  source 1..20: mol_type = other DNA
gggggtcattgtgcagatgg

SEQ ID NO: 61711 - DNA, 20 bp, synthetic construct
  misc_feature 1..20: note = chemically synthesized
  source 1..20: mol_type = other DNA
cacactggttttccaggagc

SEQ ID NO: 61712 - DNA, 20 bp, synthetic construct
  misc_feature 1..20: note = chemically synthesized
  source 1..20: mol_type = other DNA
ccaagcagtaggagaggtgg

SEQ ID NO: 61713 - DNA, 20 bp, synthetic construct
  misc_feature 1..20: note = chemically synthesized
  source 1..20: mol_type = other DNA
gtgcaaacagaaagaaatgg

SEQ ID NO: 61714 - DNA, 20 bp, synthetic construct
  misc_feature 1..20: note = chemically synthesized
  source 1..20: mol_type = other DNA
acctagacaccctcatccac

SEQ ID NO: 61715 - DNA, 20 bp, synthetic construct
  misc_feature 1..20: note = chemically synthesized
  source 1..20: mol_type = other DNA
tctcgcagtgaaaggcatac

SEQ ID NO: 61716 - DNA, 20 bp, synthetic construct
  misc_feature 1..20: note = chemically synthesized
  source 1..20: mol_type = other DNA
gtcgcccgcctacgctgccc

SEQ ID NO: 61717 - DNA, 20 bp, synthetic construct
  misc_feature 1..20: note = chemically synthesized
  source 1..20: mol_type = other DNA
gacgctttgcctgggcagtg

SEQ ID NO: 61718 - DNA, 20 bp, synthetic construct
  misc_feature 1..20: note = chemically synthesized
  source 1..20: mol_type = other DNA
gagctgtgctgcctcaggca

SEQ ID NO: 61719 - DNA, 20 bp, synthetic construct
  misc_feature 1..20: note = chemically synthesized
  source 1..20: mol_type = other DNA
cttcacctctctgaaccagg

SEQ ID NO: 61720 - DNA, 20 bp, synthetic construct
  misc_feature 1..20: note = chemically synthesized
  source 1..20: mol_type = other DNA
cacctgcatcccaaagagtt

SEQ ID NO: 61721 - DNA, 20 bp, synthetic construct
  misc_feature 1..20: note = chemically synthesized
  source 1..20: mol_type = other DNA
gttggaagtttcattcccaa

SEQ ID NO: 61722 - DNA, 20 bp, synthetic construct
  misc_feature 1..20: note = chemically synthesized
  source 1..20: mol_type = other DNA
ttatgtgggtctgcacagcc

SEQ ID NO: 61723 - DNA, 20 bp, synthetic construct
  misc_feature 1..20: note = chemically synthesized
  source 1..20: mol_type = other DNA
tcaattttgaccagcctcag

SEQ ID NO: 61724 - DNA, 20 bp, synthetic construct
  misc_feature 1..20: note = chemically synthesized
  source 1..20: mol_type = other DNA
ttgaccagcctcaggcctgt

SEQ ID NO: 61725 - DNA, 20 bp, synthetic construct
  misc_feature 1..20: note = chemically synthesized
  source 1..20: mol_type = other DNA
gaaaaccagtgtgatccgta

SEQ ID NO: 61726 - DNA, 20 bp, synthetic construct
  misc_feature 1..20: note = chemically synthesized
  source 1..20: mol_type = other DNA
agtgtgatccgtatacagct

SEQ ID NO: 61727 - DNA, 20 bp, synthetic construct
  misc_feature 1..20: note = chemically synthesized
  source 1..20: mol_type = other DNA
gttgaggctagtggggcccc

SEQ ID NO: 61728 - DNA, 20 bp, synthetic construct
  misc_feature 1..20: note = chemically synthesized
  source 1..20: mol_type = other DNA
caatccctttaaaagcctaa

SEQ ID NO: 61729 - DNA, 20 bp, synthetic construct
  misc_feature 1..20: note = chemically synthesized
  source 1..20: mol_type = other DNA
gcccgctgtgcaacccgcaa

SEQ ID NO: 61730 - DNA, 20 bp, synthetic construct
  misc_feature 1..20: note = chemically synthesized
  source 1..20: mol_type = other DNA
tggctgtgaggcctcaggtg

SEQ ID NO: 61731 - DNA, 20 bp, synthetic construct
  misc_feature 1..20: note = chemically synthesized
  source 1..20: mol_type = other DNA
tgtaccttgttgagctgctg

SEQ ID NO: 61732 - DNA, 20 bp, synthetic construct
  misc_feature 1..20: note = chemically synthesized
  source 1..20: mol_type = other DNA
ggtggggtgggccacacttg

SEQ ID NO: 61733 - DNA, 20 bp, synthetic construct
  misc_feature 1..20: note = chemically synthesized
  source 1..20: mol_type = other DNA
ccttccctgcagctccatcc

SEQ ID NO: 61734 - DNA, 20 bp, synthetic construct
  misc_feature 1..20: note = chemically synthesized
  source 1..20: mol_type = other DNA
atttcttcccctctctgggc

SEQ ID NO: 61735 - DNA, 20 bp, synthetic construct
  misc_feature 1..20: note = chemically synthesized
  source 1..20: mol_type = other DNA
cagtaggctggggaggggcg

SEQ ID NO: 61736 - DNA, 20 bp, synthetic construct
  misc_feature 1..20: note = chemically synthesized
  source 1..20: mol_type = other DNA
gaggtacagtcacactgccc

SEQ ID NO: 61737 - DNA, 20 bp, synthetic construct
  misc_feature 1..20: note = chemically synthesized
  source 1..20: mol_type = other DNA
agacctggcaccaataactg

SEQ ID NO: 61738 - DNA, 20 bp, synthetic construct
  misc_feature 1..20: note = chemically synthesized
  source 1..20: mol_type = other DNA
caggtgacatgccgggctgt

SEQ ID NO: 61739 - DNA, 20 bp, synthetic construct
  misc_feature 1..20: note = chemically synthesized
  source 1..20: mol_type = other DNA
cctgtgcctgccagaagaga

SEQ ID NO: 61740 - DNA, 20 bp, synthetic construct
  misc_feature 1..20: note = chemically synthesized
  source 1..20: mol_type = other DNA
cagaagagacagagcttgag

SEQ ID NO: 61741 - DNA, 20 bp, synthetic construct
  misc_feature 1..20: note = chemically synthesized
  source 1..20: mol_type = other DNA
tccacaggtgggagggacag

SEQ ID NO: 61742 - DNA, 20 bp, synthetic construct
  misc_feature 1..20: note = chemically synthesized
  source 1..20: mol_type = other DNA
gaaggggaggggagtctgag

SEQ ID NO: 61743 - DNA, 20 bp, synthetic construct
  misc_feature 1..20: note = chemically synthesized
  source 1..20: mol_type = other DNA
ggagggagggcagcatcagg

SEQ ID NO: 61744 - DNA, 20 bp, synthetic construct
  misc_feature 1..20: note = chemically synthesized
  source 1..20: mol_type = other DNA
ggcacacccagtacccgtct

SEQ ID NO: 61745 - DNA, 20 bp, synthetic construct
  misc_feature 1..20: note = chemically synthesized
  source 1..20: mol_type = other DNA
gcacgtacgccagctcccaa

SEQ ID NO: 61746 - DNA, 20 bp, synthetic construct
  misc_feature 1..20: note = chemically synthesized
  source 1..20: mol_type = other DNA
gttgcacagcgggcgatgca

SEQ ID NO: 61747 - DNA, 20 bp, synthetic construct
  misc_feature 1..20: note = chemically synthesized
  source 1..20: mol_type = other DNA
agcgggcgatgcaatctgat

SEQ ID NO: 61748 - DNA, 20 bp, synthetic construct
  misc_feature 1..20: note = chemically synthesized
  source 1..20: mol_type = other DNA
caatctgatttaggctttta

SEQ ID NO: 61749 - DNA, 20 bp, synthetic construct
  misc_feature 1..20: note = chemically synthesized
  source 1..20: mol_type = other DNA
ccaagctgtatacggatcac

SEQ ID NO: 61750 - DNA, 20 bp, synthetic construct
  misc_feature 1..20: note = chemically synthesized
  source 1..20: mol_type = other DNA
tcacccgaggcacttcacaa

SEQ ID NO: 61751 - DNA, 20 bp, synthetic construct
  misc_feature 1..20: note = chemically synthesized
  source 1..20: mol_type = other DNA
agcacagctcttctttacag

SEQ ID NO: 61752 - DNA, 20 bp, synthetic construct
  misc_feature 1..20: note = chemically synthesized
  source 1..20: mol_type = other DNA
ttccatcgggaccatcaaga

SEQ ID NO: 61753 - DNA, 20 bp, synthetic construct
  misc_feature 1..20: note = chemically synthesized
  source 1..20: mol_type = other DNA
gagcggtctctccgctctga

SEQ ID NO: 61754 - DNA, 20 bp, synthetic construct
  misc_feature 1..20: note = chemically synthesized
  source 1..20: mol_type = other DNA
gctaccagtggaacagccac

SEQ ID NO: 61755 - DNA, 20 bp, synthetic construct
  misc_feature 1..20: note = chemically synthesized
  source 1..20: mol_type = other DNA
ccaccttggacacaggacgc

SEQ ID NO: 61756 - DNA, 20 bp, synthetic construct
  misc_feature 1..20: note = chemically synthesized
  source 1..20: mol_type = other DNA
tcccagccagtggacttagc

SEQ ID NO: 61757 - DNA, 20 bp, synthetic construct
  misc_feature 1..20: note = chemically synthesized
  source 1..20: mol_type = other DNA
ccccgttgcccctctggatc

SEQ ID NO: 61758 - DNA, 20 bp, synthetic construct
  misc_feature 1..20: note = chemically synthesized
  source 1..20: mol_type = other DNA
cgaggacagggccctgtctc

SEQ ID NO: 61759 - DNA, 20 bp, synthetic construct
  misc_feature 1..20: note = chemically synthesized
  source 1..20: mol_type = other DNA
ttcactgcgagaggttctgg

SEQ ID NO: 61760 - DNA, 20 bp, synthetic construct
  misc_feature 1..20: note = chemically synthesized
  source 1..20: mol_type = other DNA
cagcagccatgagggttgtg

SEQ ID NO: 61761 - DNA, 20 bp, synthetic construct
  misc_feature 1..20: note = chemically synthesized
  source 1..20: mol_type = other DNA
aacaaagcgcagccatttct

SEQ ID NO: 61762 - DNA, 20 bp, synthetic construct
  misc_feature 1..20: note = chemically synthesized
  source 1..20: mol_type = other DNA
ataagcctcaccacctctcc

SEQ ID NO: 61763 - DNA, 22 bp, synthetic construct
  misc_feature 1..22: note = chemically synthesized
  source 1..22: mol_type = other DNA
aggcctggcacaggtctgttcc

SEQ ID NO: 61764 - DNA, 22 bp, synthetic construct
  misc_feature 1..22: note = chemically synthesized
  source 1..22: mol_type = other DNA
gcacaggtctgttcctggtcat

SEQ ID NO: 61765 - DNA, 22 bp, synthetic construct
  misc_feature 1..22: note = chemically synthesized
  source 1..22: mol_type = other DNA
ttcctggtcatatctggagggg

SEQ ID NO: 61766 - DNA, 22 bp, synthetic construct
  misc_feature 1..22: note = chemically synthesized
  source 1..22: mol_type = other DNA
ctggtcatatctggaggggatg

SEQ ID NO: 61767 - DNA, 22 bp, synthetic construct
  misc_feature 1..22: note = chemically synthesized
  source 1..22: mol_type = other DNA
gtcatatctggaggggatggag

SEQ ID NO: 61768 - DNA, 22 bp, synthetic construct
  misc_feature 1..22: note = chemically synthesized
  source 1..22: mol_type = other DNA
gaggggatggagaatgtgagcc

SEQ ID NO: 61769 - DNA, 22 bp, synthetic construct
  misc_feature 1..22: note = chemically synthesized
  source 1..22: mol_type = other DNA
ctccccacccctctctggacct

SEQ ID NO: 61770 - DNA, 22 bp, synthetic construct
  misc_feature 1..22: note = chemically synthesized
  source 1..22: mol_type = other DNA
cccacccctctctggaccttaa

SEQ ID NO: 61771 - DNA, 22 bp, synthetic construct
  misc_feature 1..22: note = chemically synthesized
  source 1..22: mol_type = other DNA
tctggaccttaacctcctcatc

SEQ ID NO: 61772 - DNA, 22 bp, synthetic construct
  misc_feature 1..22: note = chemically synthesized
  source 1..22: mol_type = other DNA
tggaccttaacctcctcatcta

SEQ ID NO: 61773 - DNA, 22 bp, synthetic construct
  misc_feature 1..22: note = chemically synthesized
  source 1..22: mol_type = other DNA
gaccttaacctcctcatctata

SEQ ID NO: 61774 - DNA, 22 bp, synthetic construct
  misc_feature 1..22: note = chemically synthesized
  source 1..22: mol_type = other DNA
aacctcctcatctatagaaggg

SEQ ID NO: 61775 - DNA, 22 bp, synthetic construct
  misc_feature 1..22: note = chemically synthesized
  source 1..22: mol_type = other DNA
acctcctcatctatagaagggg

SEQ ID NO: 61776 - DNA, 22 bp, synthetic construct
  misc_feature 1..22: note = chemically synthesized
  source 1..22: mol_type = other DNA
ctcatctatagaaggggagaaa

SEQ ID NO: 61777 - DNA, 22 bp, synthetic construct
  misc_feature 1..22: note = chemically synthesized
  source 1..22: mol_type = other DNA
atctatagaaggggagaaagat

SEQ ID NO: 61778 - DNA, 22 bp, synthetic construct
  misc_feature 1..22: note = chemically synthesized
  source 1..22: mol_type = other DNA
tagaaggggagaaagatgcatg

SEQ ID NO: 61779 - DNA, 22 bp, synthetic construct
  misc_feature 1..22: note = chemically synthesized
  source 1..22: mol_type = other DNA
ataggagacaacagacaggagc

SEQ ID NO: 61780 - DNA, 22 bp, synthetic construct
  misc_feature 1..22: note = chemically synthesized
  source 1..22: mol_type = other DNA
taggagacaacagacaggagcc

SEQ ID NO: 61781 - DNA, 22 bp, synthetic construct
  misc_feature 1..22: note = chemically synthesized
  source 1..22: mol_type = other DNA
tgcaaacagaaagaaatggctg

SEQ ID NO: 61782 - DNA, 22 bp, synthetic construct
  misc_feature 1..22: note = chemically synthesized
  source 1..22: mol_type = other DNA
cgctttgttgctgttgctgtat

SEQ ID NO: 61783 - DNA, 22 bp, synthetic construct
  misc_feature 1..22: note = chemically synthesized
  source 1..22: mol_type = other DNA
tgttgctgttgctgtatcttgg

SEQ ID NO: 61784 - DNA, 22 bp, synthetic construct
  misc_feature 1..22: note = chemically synthesized
  source 1..22: mol_type = other DNA
gttgctgttgctgtatcttggc

SEQ ID NO: 61785 - DNA, 22 bp, synthetic construct
  misc_feature 1..22: note = chemically synthesized
  source 1..22: mol_type = other DNA
ttgctgttgctgtatcttggct

SEQ ID NO: 61786 - DNA, 22 bp, synthetic construct
  misc_feature 1..22: note = chemically synthesized
  source 1..22: mol_type = other DNA
ctgttgctgtatcttggctggt

SEQ ID NO: 61787 - DNA, 22 bp, synthetic construct
  misc_feature 1..22: note = chemically synthesized
  source 1..22: mol_type = other DNA
ttgctgtatcttggctggtgtc

SEQ ID NO: 61788 - DNA, 22 bp, synthetic construct
  misc_feature 1..22: note = chemically synthesized
  source 1..22: mol_type = other DNA
ctgtatcttggctggtgtcccc

SEQ ID NO: 61789 - DNA, 22 bp, synthetic construct
  misc_feature 1..22: note = chemically synthesized
  source 1..22: mol_type = other DNA
tatcttggctggtgtcccccat

SEQ ID NO: 61790 - DNA, 22 bp, synthetic construct
  misc_feature 1..22: note = chemically synthesized
  source 1..22: mol_type = other DNA
ggctggtgtcccccatcctggg

SEQ ID NO: 61791 - DNA, 22 bp, synthetic construct
  misc_feature 1..22: note = chemically synthesized
  source 1..22: mol_type = other DNA
gctggtgtcccccatcctgggg

SEQ ID NO: 61792 - DNA, 22 bp, synthetic construct
  misc_feature 1..22: note = chemically synthesized
  source 1..22: mol_type = other DNA
gtgtcccccatcctggggtgcc

SEQ ID NO: 61793 - DNA, 22 bp, synthetic construct
  misc_feature 1..22: note = chemically synthesized
  source 1..22: mol_type = other DNA
gggtgccaggactgcagaccta

SEQ ID NO: 61794 - DNA, 22 bp, synthetic construct
  misc_feature 1..22: note = chemically synthesized
  source 1..22: mol_type = other DNA
cagacctagacaccctcatcca

SEQ ID NO: 61795 - DNA, 22 bp, synthetic construct
  misc_feature 1..22: note = chemically synthesized
  source 1..22: mol_type = other DNA
gacaccctcatccacttctgct

SEQ ID NO: 61796 - DNA, 22 bp, synthetic construct
  misc_feature 1..22: note = chemically synthesized
  source 1..22: mol_type = other DNA
atccacttctgcttacaggaac

SEQ ID NO: 61797 - DNA, 22 bp, synthetic construct
  misc_feature 1..22: note = chemically synthesized
  source 1..22: mol_type = other DNA
ctgcttacaggaaccagtgtat

SEQ ID NO: 61798 - DNA, 22 bp, synthetic construct
  misc_feature 1..22: note = chemically synthesized
  source 1..22: mol_type = other DNA
tgcttacaggaaccagtgtatc

SEQ ID NO: 61799 - DNA, 22 bp, synthetic construct
  misc_feature 1..22: note = chemically synthesized
  source 1..22: mol_type = other DNA
cttacaggaaccagtgtatcca

SEQ ID NO: 61800 - DNA, 22 bp, synthetic construct
  misc_feature 1..22: note = chemically synthesized
  source 1..22: mol_type = other DNA
acaggaaccagtgtatccacca

SEQ ID NO: 61801 - DNA, 22 bp, synthetic construct
  misc_feature 1..22: note = chemically synthesized
  source 1..22: mol_type = other DNA
caggaaccagtgtatccaccag

SEQ ID NO: 61802 - DNA, 22 bp, synthetic construct
  misc_feature 1..22: note = chemically synthesized
  source 1..22: mol_type = other DNA
ggaaacaggacacaaccctcat

SEQ ID NO: 61803 - DNA, 22 bp, synthetic construct
  misc_feature 1..22: note = chemically synthesized
  source 1..22: mol_type = other DNA
atggctgctgttattatgaaaa

SEQ ID NO: 61804 - DNA, 22 bp, synthetic construct
  misc_feature 1..22: note = chemically synthesized
  source 1..22: mol_type = other DNA
ctgttattatgaaaataggagc

SEQ ID NO: 61805 - DNA, 22 bp, synthetic construct
  misc_feature 1..22: note = chemically synthesized
  source 1..22: mol_type = other DNA
ttattatgaaaataggagctca

SEQ ID NO: 61806 - DNA, 22 bp, synthetic construct
  misc_feature 1..22: note = chemically synthesized
  source 1..22: mol_type = other DNA
ttatgaaaataggagctcagct

SEQ ID NO: 61807 - DNA, 22 bp, synthetic construct
  misc_feature 1..22: note = chemically synthesized
  source 1..22: mol_type = other DNA
tgaaaataggagctcagctgca

SEQ ID NO: 61808 - DNA, 22 bp, synthetic construct
  misc_feature 1..22: note = chemically synthesized
  source 1..22: mol_type = other DNA
agctgcagcctctccatctgcc

SEQ ID NO: 61809 - DNA, 22 bp, synthetic construct
  misc_feature 1..22: note = chemically synthesized
  source 1..22: mol_type = other DNA
cagcctctccatctgccctgca

SEQ ID NO: 61810 - DNA, 22 bp, synthetic construct
  misc_feature 1..22: note = chemically synthesized
  source 1..22: mol_type = other DNA
tccatctgccctgcacctcagc

SEQ ID NO: 61811 - DNA, 22 bp, synthetic construct
  misc_feature 1..22: note = chemically synthesized
  source 1..22: mol_type = other DNA
catctgccctgcacctcagcag

SEQ ID NO: 61812 - DNA, 22 bp, synthetic construct
  misc_feature 1..22: note = chemically synthesized
  source 1..22: mol_type = other DNA
ccctgcacctcagcaggcggat

SEQ ID NO: 61813 - DNA, 22 bp, synthetic construct
  misc_feature 1..22: note = chemically synthesized
  source 1..22: mol_type = other DNA
cacctcagcaggcggataccca

SEQ ID NO: 61814 - DNA, 22 bp, synthetic construct
  misc_feature 1..22: note = chemically synthesized
  source 1..22: mol_type = other DNA
agcaggcggatacccactccac

SEQ ID NO: 61815 - DNA, 22 bp, synthetic construct
  misc_feature 1..22: note = chemically synthesized
  source 1..22: mol_type = other DNA
cacaacccccctcctgccccag

SEQ ID NO: 61816 - DNA, 22 bp, synthetic construct
  misc_feature 1..22: note = chemically synthesized
  source 1..22: mol_type = other DNA
ctgccccagacctgctgcctgc

SEQ ID NO: 61817 - DNA, 22 bp, synthetic construct
  misc_feature 1..22: note = chemically synthesized
  source 1..22: mol_type = other DNA
ccccagacctgctgcctgcctg

SEQ ID NO: 61818 - DNA, 22 bp, synthetic construct
  misc_feature 1..22: note = chemically synthesized
  source 1..22: mol_type = other DNA
ctgcctgcctgggccatgggga

SEQ ID NO: 61819 - DNA, 22 bp, synthetic construct
  misc_feature 1..22: note = chemically synthesized
  source 1..22: mol_type = other DNA
cctgcctgggccatggggagct

SEQ ID NO: 61820 - DNA, 22 bp, synthetic construct
  misc_feature 1..22: note = chemically synthesized
  source 1..22: mol_type = other DNA
cctgggccatggggagctcaga

SEQ ID NO: 61821 - DNA, 22 bp, synthetic construct
  misc_feature 1..22: note = chemically synthesized
  source 1..22: mol_type = other DNA
ggccatggggagctcagaagcc

SEQ ID NO: 61822 - DNA, 22 bp, synthetic construct
  misc_feature 1..22: note = chemically synthesized
  source 1..22: mol_type = other DNA
agaagcctctccagaacctctc

SEQ ID NO: 61823 - DNA, 22 bp, synthetic construct
  misc_feature 1..22: note = chemically synthesized
  source 1..22: mol_type = other DNA
tccagaacctctcgcagtgaaa

SEQ ID NO: 61824 - DNA, 22 bp, synthetic construct
  misc_feature 1..22: note = chemically synthesized
  source 1..22: mol_type = other DNA
cagaacctctcgcagtgaaagg

SEQ ID NO: 61825 - DNA, 22 bp, synthetic construct
  misc_feature 1..22: note = chemically synthesized
  source 1..22: mol_type = other DNA
tcgcagtgaaaggcatacttac

SEQ ID NO: 61826 - DNA, 22 bp, synthetic construct
  misc_feature 1..22: note = chemically synthesized
  source 1..22: mol_type = other DNA
gcagtgaaaggcatacttacga

SEQ ID NO: 61827 - DNA, 22 bp, synthetic construct
  misc_feature 1..22: note = chemically synthesized
  source 1..22: mol_type = other DNA
acgattcactgtcccaggtcag

SEQ ID NO: 61828 - DNA, 22 bp, synthetic construct
  misc_feature 1..22: note = chemically synthesized
  source 1..22: mol_type = other DNA
cgattcactgtcccaggtcagt

SEQ ID NO: 61829 - DNA, 22 bp, synthetic construct
  misc_feature 1..22: note = chemically synthesized
  source 1..22: mol_type = other DNA
actgtcccaggtcagtggtggt

SEQ ID NO: 61830 - DNA, 22 bp, synthetic construct
  misc_feature 1..22: note = chemically synthesized
  source 1..22: mol_type = other DNA
tcccaggtcagtggtggtgcct

SEQ ID NO: 61831 - DNA, 22 bp, synthetic construct
  misc_feature 1..22: note = chemically synthesized
  source 1..22: mol_type = other DNA
aagctgaggagacagggccctg

SEQ ID NO: 61832 - DNA, 22 bp, synthetic construct
  misc_feature 1..22: note = chemically synthesized
  source 1..22: mol_type = other DNA
aggagacagggccctgtcctcg

SEQ ID NO: 61833 - DNA, 22 bp, synthetic construct
  misc_feature 1..22: note = chemically synthesized
  source 1..22: mol_type = other DNA
tcctcgtccgtatttaagcagt

SEQ ID NO: 61834 - DNA, 22 bp, synthetic construct
  misc_feature 1..22: note = chemically synthesized
  source 1..22: mol_type = other DNA
gtccgtatttaagcagtggatc

SEQ ID NO: 61835 - DNA, 22 bp, synthetic construct
  misc_feature 1..22: note = chemically synthesized
  source 1..22: mol_type = other DNA
aagcagtggatccagaggggca

SEQ ID NO: 61836 - DNA, 22 bp, synthetic construct
  misc_feature 1..22: note = chemically synthesized
  source 1..22: mol_type = other DNA
agcagtggatccagaggggcaa

SEQ ID NO: 61837 - DNA, 22 bp, synthetic construct
  misc_feature 1..22: note = chemically synthesized
  source 1..22: mol_type = other DNA
ctggtgaatattaaccaaggtc

SEQ ID NO: 61838 - DNA, 22 bp, synthetic construct
  misc_feature 1..22: note = chemically synthesized
  source 1..22: mol_type = other DNA
gtgaatattaaccaaggtcacc

SEQ ID NO: 61839 - DNA, 22 bp, synthetic construct
  misc_feature 1..22: note = chemically synthesized
  source 1..22: mol_type = other DNA
accaaggtcaccccagttatcg

SEQ ID NO: 61840 - DNA, 22 bp, synthetic construct
  misc_feature 1..22: note = chemically synthesized
  source 1..22: mol_type = other DNA
tcggaggagcaaacaggggcta

SEQ ID NO: 61841 - DNA, 22 bp, synthetic construct
  misc_feature 1..22: note = chemically synthesized
  source 1..22: mol_type = other DNA
agtccactggctgggatctgag

SEQ ID NO: 61842 - DNA, 22 bp, synthetic construct
  misc_feature 1..22: note = chemically synthesized
  source 1..22: mol_type = other DNA
gctgggatctgagtcgcccgcc

SEQ ID NO: 61843 - DNA, 22 bp, synthetic construct
  misc_feature 1..22: note = chemically synthesized
  source 1..22: mol_type = other DNA
ggatctgagtcgcccgcctacg

SEQ ID NO: 61844 - DNA, 22 bp, synthetic construct
  misc_feature 1..22: note = chemically synthesized
  source 1..22: mol_type = other DNA
agtcgcccgcctacgctgcccg

SEQ ID NO: 61845 - DNA, 22 bp, synthetic construct
  misc_feature 1..22: note = chemically synthesized
  source 1..22: mol_type = other DNA
cgctgcccggacgctttgcctg

SEQ ID NO: 61846 - DNA, 22 bp, synthetic construct
  misc_feature 1..22: note = chemically synthesized
  source 1..22: mol_type = other DNA
cccggacgctttgcctgggcag

SEQ ID NO: 61847 - DNA, 22 bp, synthetic construct
  misc_feature 1..22: note = chemically synthesized
  source 1..22: mol_type = other DNA
tgcctgggcagtgtacagcttc

SEQ ID NO: 61848 - DNA, 22 bp, synthetic construct
  misc_feature 1..22: note = chemically synthesized
  source 1..22: mol_type = other DNA
gcctgggcagtgtacagcttcc

SEQ ID NO: 61849 - DNA, 22 bp, synthetic construct
  misc_feature 1..22: note = chemically synthesized
  source 1..22: mol_type = other DNA
cctgggcagtgtacagcttcca

SEQ ID NO: 61850 - DNA, 22 bp, synthetic construct
  misc_feature 1..22: note = chemically synthesized
  source 1..22: mol_type = other DNA
ggcagtgtacagcttccactgc

SEQ ID NO: 61851 - DNA, 22 bp, synthetic construct
  misc_feature 1..22: note = chemically synthesized
  source 1..22: mol_type = other DNA
ccactgcacttaccgaaaggag

SEQ ID NO: 61852 - DNA, 22 bp, synthetic construct
  misc_feature 1..22: note = chemically synthesized
  source 1..22: mol_type = other DNA
cactgcacttaccgaaaggagt

SEQ ID NO: 61853 - DNA, 22 bp, synthetic construct
  misc_feature 1..22: note = chemically synthesized
  source 1..22: mol_type = other DNA
cacttaccgaaaggagtcattg

SEQ ID NO: 61854 - DNA, 22 bp, synthetic construct
  misc_feature 1..22: note = chemically synthesized
  source 1..22: mol_type = other DNA
accgaaaggagtcattgtacct

SEQ ID NO: 61855 - DNA, 22 bp, synthetic construct
  misc_feature 1..22: note = chemically synthesized
  source 1..22: mol_type = other DNA
ccgaaaggagtcattgtacctg

SEQ ID NO: 61856 - DNA, 22 bp, synthetic construct
  misc_feature 1..22: note = chemically synthesized
  source 1..22: mol_type = other DNA
tacctggctcagaaaccacagc

SEQ ID NO: 61857 - DNA, 22 bp, synthetic construct
  misc_feature 1..22: note = chemically synthesized
  source 1..22: mol_type = other DNA
gctcagaaaccacagcgtcctg

SEQ ID NO: 61858 - DNA, 22 bp, synthetic construct
  misc_feature 1..22: note = chemically synthesized
  source 1..22: mol_type = other DNA
agaaaccacagcgtcctgtgtc

SEQ ID NO: 61859 - DNA, 22 bp, synthetic construct
  misc_feature 1..22: note = chemically synthesized
  source 1..22: mol_type = other DNA
tgtccaaggtggagggggtggc

SEQ ID NO: 61860 - DNA, 22 bp, synthetic construct
  misc_feature 1..22: note = chemically synthesized
  source 1..22: mol_type = other DNA
tgggagagtaccacttagctgg

SEQ ID NO: 61861 - DNA, 22 bp, synthetic construct
  misc_feature 1..22: note = chemically synthesized
  source 1..22: mol_type = other DNA
ggagagtaccacttagctggcc

SEQ ID NO: 61862 - DNA, 22 bp, synthetic construct
  misc_feature 1..22: note = chemically synthesized
  source 1..22: mol_type = other DNA
agctggccctctgctctcactg

SEQ ID NO: 61863 - DNA, 22 bp, synthetic construct
  misc_feature 1..22: note = chemically synthesized
  source 1..22: mol_type = other DNA
gctggccctctgctctcactgc

SEQ ID NO: 61864 - DNA, 22 bp, synthetic construct
  misc_feature 1..22: note = chemically synthesized
  source 1..22: mol_type = other DNA
gccctctgctctcactgcagaa

SEQ ID NO: 61865 - DNA, 22 bp, synthetic construct
  misc_feature 1..22: note = chemically synthesized
  source 1..22: mol_type = other DNA
tgctctcactgcagaatcctta

SEQ ID NO: 61866 - DNA, 22 bp, synthetic construct
  misc_feature 1..22: note = chemically synthesized
  source 1..22: mol_type = other DNA
ctctcactgcagaatccttagt

SEQ ID NO: 61867 - DNA, 22 bp, synthetic construct
  misc_feature 1..22: note = chemically synthesized
  source 1..22: mol_type = other DNA
tcactgcagaatccttagtggc

SEQ ID NO: 61868 - DNA, 22 bp, synthetic construct
  misc_feature 1..22: note = chemically synthesized
  source 1..22: mol_type = other DNA
actgcagaatccttagtggctg

SEQ ID NO: 61869 - DNA, 22 bp, synthetic construct
  misc_feature 1..22: note = chemically synthesized
  source 1..22: mol_type = other DNA
cagaatccttagtggctgttcc

SEQ ID NO: 61870 - DNA, 22 bp, synthetic construct
  misc_feature 1..22: note = chemically synthesized
  source 1..22: mol_type = other DNA
agtggctgttccactggtagca

SEQ ID NO: 61871 - DNA, 22 bp, synthetic construct
  misc_feature 1..22: note = chemically synthesized
  source 1..22: mol_type = other DNA
gtggctgttccactggtagcaa

SEQ ID NO: 61872 - DNA, 22 bp, synthetic construct
  misc_feature 1..22: note = chemically synthesized
  source 1..22: mol_type = other DNA
ttccactggtagcaagatctac

SEQ ID NO: 61873 - DNA, 22 bp, synthetic construct
  misc_feature 1..22: note = chemically synthesized
  source 1..22: mol_type = other DNA
cactggtagcaagatctaccat

SEQ ID NO: 61874 - DNA, 22 bp, synthetic construct
  misc_feature 1..22: note = chemically synthesized
  source 1..22: mol_type = other DNA
gtagcaagatctaccatttact

SEQ ID NO: 61875 - DNA, 22 bp, synthetic construct
  misc_feature 1..22: note = chemically synthesized
  source 1..22: mol_type = other DNA
ccatttactgagtcaccccaaa

SEQ ID NO: 61876 - DNA, 22 bp, synthetic construct
  misc_feature 1..22: note = chemically synthesized
  source 1..22: mol_type = other DNA
actgagtcaccccaaaatgcct

SEQ ID NO: 61877 - DNA, 22 bp, synthetic construct
  misc_feature 1..22: note = chemically synthesized
  source 1..22: mol_type = other DNA
ctgagtcaccccaaaatgcctg

SEQ ID NO: 61878 - DNA, 22 bp, synthetic construct
  misc_feature 1..22: note = chemically synthesized
  source 1..22: mol_type = other DNA
agtcaccccaaaatgcctgatg

SEQ ID NO: 61879 - DNA, 22 bp, synthetic construct
  misc_feature 1..22: note = chemically synthesized
  source 1..22: mol_type = other DNA
atgctgaagacttactgccgcc

SEQ ID NO: 61880 - DNA, 22 bp, synthetic construct
  misc_feature 1..22: note = chemically synthesized
  source 1..22: mol_type = other DNA
aagacttactgccgccctggga

SEQ ID NO: 61881 - DNA, 22 bp, synthetic construct
  misc_feature 1..22: note = chemically synthesized
  source 1..22: mol_type = other DNA
actgccgccctgggagatcaga

SEQ ID NO: 61882 - DNA, 22 bp, synthetic construct
  misc_feature 1..22: note = chemically synthesized
  source 1..22: mol_type = other DNA
ctgccgccctgggagatcagag

SEQ ID NO: 61883 - DNA, 22 bp, synthetic construct
  misc_feature 1..22: note = chemically synthesized
  source 1..22: mol_type = other DNA
ccgccctgggagatcagagtgg

SEQ ID NO: 61884 - DNA, 22 bp, synthetic construct
  misc_feature 1..22: note = chemically synthesized
  source 1..22: mol_type = other DNA
ggagatcagagtgggttagagc

SEQ ID NO: 61885 - DNA, 22 bp, synthetic construct
  misc_feature 1..22: note = chemically synthesized
  source 1..22: mol_type = other DNA
gagcccatttgacagatgagga

SEQ ID NO: 61886 - DNA, 22 bp, synthetic construct
  misc_feature 1..22: note = chemically synthesized
  source 1..22: mol_type = other DNA
gacagatgaggaaacaggctca

SEQ ID NO: 61887 - DNA, 22 bp, synthetic construct
  misc_feature 1..22: note = chemically synthesized
  source 1..22: mol_type = other DNA
acagatgaggaaacaggctcag

SEQ ID NO: 61888 - DNA, 22 bp, synthetic construct
  misc_feature 1..22: note = chemically synthesized
  source 1..22: mol_type = other DNA
agagcggagagaccgctcatcc

SEQ ID NO: 61889 - DNA, 22 bp, synthetic construct
  misc_feature 1..22: note = chemically synthesized
  source 1..22: mol_type = other DNA
atccaaagttacccagtcagcc

SEQ ID NO: 61890 - DNA, 22 bp, synthetic construct
  misc_feature 1..22: note = chemically synthesized
  source 1..22: mol_type = other DNA
cccagtcagccttagacacaaa

SEQ ID NO: 61891 - DNA, 22 bp, synthetic construct
  misc_feature 1..22: note = chemically synthesized
  source 1..22: mol_type = other DNA
agacacaaacaccctcttgatg

SEQ ID NO: 61892 - DNA, 22 bp, synthetic construct
  misc_feature 1..22: note = chemically synthesized
  source 1..22: mol_type = other DNA
gacacaaacaccctcttgatgg

SEQ ID NO: 61893 - DNA, 22 bp, synthetic construct
  misc_feature 1..22: note = chemically synthesized
  source 1..22: mol_type = other DNA
ttgatggtcccgatggaaaaat

SEQ ID NO: 61894 - DNA, 22 bp, synthetic construct
  misc_feature 1..22: note = chemically synthesized
  source 1..22: mol_type = other DNA
gatggtcccgatggaaaaatgg

SEQ ID NO: 61895 - DNA, 22 bp, synthetic construct
  misc_feature 1..22: note = chemically synthesized
  source 1..22: mol_type = other DNA
atggtcccgatggaaaaatgga

SEQ ID NO: 61896 - DNA, 22 bp, synthetic construct
  misc_feature 1..22: note = chemically synthesized
  source 1..22: mol_type = other DNA
aggcagacacaaccgtcaggct

SEQ ID NO: 61897 - DNA, 22 bp, synthetic construct
  misc_feature 1..22: note = chemically synthesized
  source 1..22: mol_type = other DNA
gcatggggggccgtgagacagg

SEQ ID NO: 61898 - DNA, 22 bp, synthetic construct
  misc_feature 1..22: note = chemically synthesized
  source 1..22: mol_type = other DNA
taaagaagagctgtgctgcctc

SEQ ID NO: 61899 - DNA, 22 bp, synthetic construct
  misc_feature 1..22: note = chemically synthesized
  source 1..22: mol_type = other DNA
tgctgcctcaggcaggccgctt

SEQ ID NO: 61900 - DNA, 22 bp, synthetic construct
  misc_feature 1..22: note = chemically synthesized
  source 1..22: mol_type = other DNA
cctcaggcaggccgcttcacct

SEQ ID NO: 61901 - DNA, 22 bp, synthetic construct
  misc_feature 1..22: note = chemically synthesized
  source 1..22: mol_type = other DNA
aggcaggccgcttcacctctct

SEQ ID NO: 61902 - DNA, 22 bp, synthetic construct
  misc_feature 1..22: note = chemically synthesized
  source 1..22: mol_type = other DNA
cacctctctgaaccaggaactg

SEQ ID NO: 61903 - DNA, 22 bp, synthetic construct
  misc_feature 1..22: note = chemically synthesized
  source 1..22: mol_type = other DNA
acctctctgaaccaggaactgt

SEQ ID NO: 61904 - DNA, 22 bp, synthetic construct
  misc_feature 1..22: note = chemically synthesized
  source 1..22: mol_type = other DNA
tctgaaccaggaactgtttcac

SEQ ID NO: 61905 - DNA, 22 bp, synthetic construct
  misc_feature 1..22: note = chemically synthesized
  source 1..22: mol_type = other DNA
tgaaccaggaactgtttcacct

SEQ ID NO: 61906 - DNA, 22 bp, synthetic construct
  misc_feature 1..22: note = chemically synthesized
  source 1..22: mol_type = other DNA
aaccaggaactgtttcacctgc

SEQ ID NO: 61907 - DNA, 22 bp, synthetic construct
  misc_feature 1..22: note = chemically synthesized
  source 1..22: mol_type = other DNA
tttcacctgcatcccaaagagt

SEQ ID NO: 61908 - DNA, 22 bp, synthetic construct
  misc_feature 1..22: note = chemically synthesized
  source 1..22: mol_type = other DNA
cacctgcatcccaaagagttgg

SEQ ID NO: 61909 - DNA, 22 bp, synthetic construct
  misc_feature 1..22: note = chemically synthesized
  source 1..22: mol_type = other DNA
acctgcatcccaaagagttgga

SEQ ID NO: 61910 - DNA, 22 bp, synthetic construct
  misc_feature 1..22: note = chemically synthesized
  source 1..22: mol_type = other DNA
catcccaaagagttggaagttt

SEQ ID NO: 61911 - DNA, 22 bp, synthetic construct
  misc_feature 1..22: note = chemically synthesized
  source 1..22: mol_type = other DNA
gaagtttcattcccaagcatgc

SEQ ID NO: 61912 - DNA, 22 bp, synthetic construct
  misc_feature 1..22: note = chemically synthesized
  source 1..22: mol_type = other DNA
cattcccaagcatgcttgtgaa

SEQ ID NO: 61913 - DNA, 22 bp, synthetic construct
  misc_feature 1..22: note = chemically synthesized
  source 1..22: mol_type = other DNA
attcccaagcatgcttgtgaag

SEQ ID NO: 61914 - DNA, 22 bp, synthetic construct
  misc_feature 1..22: note = chemically synthesized
  source 1..22: mol_type = other DNA
ccaagcatgcttgtgaagtgcc

SEQ ID NO: 61915 - DNA, 22 bp, synthetic construct
  misc_feature 1..22: note = chemically synthesized
  source 1..22: mol_type = other DNA
gtgaagtgcctcgggtgaagtg

SEQ ID NO: 61916 - DNA, 22 bp, synthetic construct
  misc_feature 1..22: note = chemically synthesized
  source 1..22: mol_type = other DNA
tgaagtgcctcgggtgaagtgc

SEQ ID NO: 61917 - DNA, 22 bp, synthetic construct
  misc_feature 1..22: note = chemically synthesized
  source 1..22: mol_type = other DNA
gggtgaagtgcctggcacacag

SEQ ID NO: 61918 - DNA, 22 bp, synthetic construct
  misc_feature 1..22: note = chemically synthesized
  source 1..22: mol_type = other DNA
gcacacagtaggctctttatgt

SEQ ID NO: 61919 - DNA, 22 bp, synthetic construct
  misc_feature 1..22: note = chemically synthesized
  source 1..22: mol_type = other DNA
tttatgtgggtctgcacagccc

SEQ ID NO: 61920 - DNA, 22 bp, synthetic construct
  misc_feature 1..22: note = chemically synthesized
  source 1..22: mol_type = other DNA
tatgtgggtctgcacagccctc

SEQ ID NO: 61921 - DNA, 22 bp, synthetic construct
  misc_feature 1..22: note = chemically synthesized
  source 1..22: mol_type = other DNA
atgtgggtctgcacagccctct

SEQ ID NO: 61922 - DNA, 22 bp, synthetic construct
  misc_feature 1..22: note = chemically synthesized
  source 1..22: mol_type = other DNA
tgtgggtctgcacagccctctg

SEQ ID NO: 61923 - DNA, 22 bp, synthetic construct
  misc_feature 1..22: note = chemically synthesized
  source 1..22: mol_type = other DNA
cacagccctctgcttagtctgc

SEQ ID NO: 61924 - DNA, 22 bp, synthetic construct
  misc_feature 1..22: note = chemically synthesized
  source 1..22: mol_type = other DNA
tgcttagtctgccccccaggct

SEQ ID NO: 61925 - DNA, 22 bp, synthetic construct
  misc_feature 1..22: note = chemically synthesized
  source 1..22: mol_type = other DNA
cttagtctgccccccaggctgc

SEQ ID NO: 61926 - DNA, 22 bp, synthetic construct
  misc_feature 1..22: note = chemically synthesized
  source 1..22: mol_type = other DNA
agtctgccccccaggctgctca

SEQ ID NO: 61927 - DNA, 22 bp, synthetic construct
  misc_feature 1..22: note = chemically synthesized
  source 1..22: mol_type = other DNA
gtctgccccccaggctgctcag

SEQ ID NO: 61928 - DNA, 22 bp, synthetic construct
  misc_feature 1..22: note = chemically synthesized
  source 1..22: mol_type = other DNA
ccccccaggctgctcagagcag

SEQ ID NO: 61929 - DNA, 22 bp, synthetic construct
  misc_feature 1..22: note = chemically synthesized
  source 1..22: mol_type = other DNA
ctcagagcaggaggaggttcaa

SEQ ID NO: 61930 - DNA, 22 bp, synthetic construct
  misc_feature 1..22: note = chemically synthesized
  source 1..22: mol_type = other DNA
agagcaggaggaggttcaattt

SEQ ID NO: 61931 - DNA, 22 bp, synthetic construct
  misc_feature 1..22: note = chemically synthesized
  source 1..22: mol_type = other DNA
aattttgaccagcctcaggcct

SEQ ID NO: 61932 - DNA, 22 bp, synthetic construct
  misc_feature 1..22: note = chemically synthesized
  source 1..22: mol_type = other DNA
tgaccagcctcaggcctgtttc

SEQ ID NO: 61933 - DNA, 22 bp, synthetic construct
  misc_feature 1..22: note = chemically synthesized
  source 1..22: mol_type = other DNA
gaccagcctcaggcctgtttct

SEQ ID NO: 61934 - DNA, 22 bp, synthetic construct
  misc_feature 1..22: note = chemically synthesized
  source 1..22: mol_type = other DNA
accagcctcaggcctgtttctg

SEQ ID NO: 61935 - DNA, 22 bp, synthetic construct
  misc_feature 1..22: note = chemically synthesized
  source 1..22: mol_type = other DNA
aggcctgtttctgtttttgctc

SEQ ID NO: 61936 - DNA, 22 bp, synthetic construct
  misc_feature 1..22: note = chemically synthesized
  source 1..22: mol_type = other DNA
tttctgtttttgctcctggaaa

SEQ ID NO: 61937 - DNA, 22 bp, synthetic construct
  misc_feature 1..22: note = chemically synthesized
  source 1..22: mol_type = other DNA
ctgtttttgctcctggaaaacc

SEQ ID NO: 61938 - DNA, 22 bp, synthetic construct
  misc_feature 1..22: note = chemically synthesized
  source 1..22: mol_type = other DNA
tgtttttgctcctggaaaacca

SEQ ID NO: 61939 - DNA, 22 bp, synthetic construct
  misc_feature 1..22: note = chemically synthesized
  source 1..22: mol_type = other DNA
tttttgctcctggaaaaccagt

SEQ ID NO: 61940 - DNA, 22 bp, synthetic construct
  misc_feature 1..22: note = chemically synthesized
  source 1..22: mol_type = other DNA
ttgctcctggaaaaccagtgtg

SEQ ID NO: 61941 - DNA, 22 bp, synthetic construct
  misc_feature 1..22: note = chemically synthesized
  source 1..22: mol_type = other DNA
tgctcctggaaaaccagtgtga

SEQ ID NO: 61942 - DNA, 22 bp, synthetic construct
  misc_feature 1..22: note = chemically synthesized
  source 1..22: mol_type = other DNA
gctcctggaaaaccagtgtgat

SEQ ID NO: 61943 - DNA, 22 bp, synthetic construct
  misc_feature 1..22: note = chemically synthesized
  source 1..22: mol_type = other DNA
ctcctggaaaaccagtgtgatc

SEQ ID NO: 61944 - DNA, 22 bp, synthetic construct
  misc_feature 1..22: note = chemically synthesized
  source 1..22: mol_type = other DNA
ctggaaaaccagtgtgatccgt

SEQ ID NO: 61945 - DNA, 22 bp, synthetic construct
  misc_feature 1..22: note = chemically synthesized
  source 1..22: mol_type = other DNA
gaaaaccagtgtgatccgtata

SEQ ID NO: 61946 - DNA, 22 bp, synthetic construct
  misc_feature 1..22: note = chemically synthesized
  source 1..22: mol_type = other DNA
ggagtttctttggatacatggc

SEQ ID NO: 61947 - DNA, 22 bp, synthetic construct
  misc_feature 1..22: note = chemically synthesized
  source 1..22: mol_type = other DNA
gagtttctttggatacatggcc

SEQ ID NO: 61948 - DNA, 22 bp, synthetic construct
  misc_feature 1..22: note = chemically synthesized
  source 1..22: mol_type = other DNA
ctttggatacatggcccccact

SEQ ID NO: 61949 - DNA, 22 bp, synthetic construct
  misc_feature 1..22: note = chemically synthesized
  source 1..22: mol_type = other DNA
tttggatacatggcccccactc

SEQ ID NO: 61950 - DNA, 22 bp, synthetic construct
  misc_feature 1..22: note = chemically synthesized
  source 1..22: mol_type = other DNA
tggatacatggcccccactctg

SEQ ID NO: 61951 - DNA, 22 bp, synthetic construct
  misc_feature 1..22: note = chemically synthesized
  source 1..22: mol_type = other DNA
ggatacatggcccccactctgg

SEQ ID NO: 61952 - DNA, 22 bp, synthetic construct
  misc_feature 1..22: note = chemically synthesized
  source 1..22: mol_type = other DNA
gatacatggcccccactctggg

SEQ ID NO: 61953 - DNA, 22 bp, synthetic construct
  misc_feature 1..22: note = chemically synthesized
  source 1..22: mol_type = other DNA
tggggttgttggaggcctttgg

SEQ ID NO: 61954 - DNA, 22 bp, synthetic construct
  misc_feature 1..22: note = chemically synthesized
  source 1..22: mol_type = other DNA
gggttgttggaggcctttggag

SEQ ID NO: 61955 - DNA, 22 bp, synthetic construct
  misc_feature 1..22: note = chemically synthesized
  source 1..22: mol_type = other DNA
ttggaggcctttggagactgct

SEQ ID NO: 61956 - DNA, 22 bp, synthetic construct
  misc_feature 1..22: note = chemically synthesized
  source 1..22: mol_type = other DNA
gaggcctttggagactgctggg

SEQ ID NO: 61957 - DNA, 22 bp, synthetic construct
  misc_feature 1..22: note = chemically synthesized
  source 1..22: mol_type = other DNA
tggagactgctgggggtggagg

SEQ ID NO: 61958 - DNA, 22 bp, synthetic construct
  misc_feature 1..22: note = chemically synthesized
  source 1..22: mol_type = other DNA
ggagactgctgggggtggaggg

SEQ ID NO: 61959 - DNA, 22 bp, synthetic construct
  misc_feature 1..22: note = chemically synthesized
  source 1..22: mol_type = other DNA
gagactgctgggggtggagggg

SEQ ID NO: 61960 - DNA, 22 bp, synthetic construct
  misc_feature 1..22: note = chemically synthesized
  source 1..22: mol_type = other DNA
ctgggggtggaggggaggggag

SEQ ID NO: 61961 - DNA, 22 bp, synthetic construct
  misc_feature 1..22: note = chemically synthesized
  source 1..22: mol_type = other DNA
ggggtggaggggaggggaggta

SEQ ID NO: 61962 - DNA, 22 bp, synthetic construct
  misc_feature 1..22: note = chemically synthesized
  source 1..22: mol_type = other DNA
aggctagtggggccccacttga

SEQ ID NO: 61963 - DNA, 22 bp, synthetic construct
  misc_feature 1..22: note = chemically synthesized
  source 1..22: mol_type = other DNA
gtggggccccacttgattgcaa

SEQ ID NO: 61964 - DNA, 22 bp, synthetic construct
  misc_feature 1..22: note = chemically synthesized
  source 1..22: mol_type = other DNA
gattgcaatccctttaaaagcc

SEQ ID NO: 61965 - DNA, 22 bp, synthetic construct
  misc_feature 1..22: note = chemically synthesized
  source 1..22: mol_type = other DNA
attgcaatccctttaaaagcct

SEQ ID NO: 61966 - DNA, 22 bp, synthetic construct
  misc_feature 1..22: note = chemically synthesized
  source 1..22: mol_type = other DNA
caatccctttaaaagcctaaat

SEQ ID NO: 61967 - DNA, 22 bp, synthetic construct
  misc_feature 1..22: note = chemically synthesized
  source 1..22: mol_type = other DNA
taaaagcctaaatcagattgca

SEQ ID NO: 61968 - DNA, 22 bp, synthetic construct
  misc_feature 1..22: note = chemically synthesized
  source 1..22: mol_type = other DNA
aaaagcctaaatcagattgcat

SEQ ID NO: 61969 - DNA, 22 bp, synthetic construct
  misc_feature 1..22: note = chemically synthesized
  source 1..22: mol_type = other DNA
aaagcctaaatcagattgcatc

SEQ ID NO: 61970 - DNA, 22 bp, synthetic construct
  misc_feature 1..22: note = chemically synthesized
  source 1..22: mol_type = other DNA
aatcagattgcatcgcccgctg

SEQ ID NO: 61971 - DNA, 22 bp, synthetic construct
  misc_feature 1..22: note = chemically synthesized
  source 1..22: mol_type = other DNA
catcgcccgctgtgcaacccgc

SEQ ID NO: 61972 - DNA, 22 bp, synthetic construct
  misc_feature 1..22: note = chemically synthesized
  source 1..22: mol_type = other DNA
tgcaacccgcaaacctgcttgg

SEQ ID NO: 61973 - DNA, 22 bp, synthetic construct
  misc_feature 1..22: note = chemically synthesized
  source 1..22: mol_type = other DNA
cttgggagctggcgtacgtgcc

SEQ ID NO: 61974 - DNA, 22 bp, synthetic construct
  misc_feature 1..22: note = chemically synthesized
  source 1..22: mol_type = other DNA
gggagctggcgtacgtgccgta

SEQ ID NO: 61975 - DNA, 22 bp, synthetic construct
  misc_feature 1..22: note = chemically synthesized
  source 1..22: mol_type = other DNA
ggagctggcgtacgtgccgtag

SEQ ID NO: 61976 - DNA, 22 bp, synthetic construct
  misc_feature 1..22: note = chemically synthesized
  source 1..22: mol_type = other DNA
gcgtacgtgccgtagatacttg

SEQ ID NO: 61977 - DNA, 22 bp, synthetic construct
  misc_feature 1..22: note = chemically synthesized
  source 1..22: mol_type = other DNA
gcagagtgaatggatgagtgca

SEQ ID NO: 61978 - DNA, 22 bp, synthetic construct
  misc_feature 1..22: note = chemically synthesized
  source 1..22: mol_type = other DNA
cagagtgaatggatgagtgcat

SEQ ID NO: 61979 - DNA, 22 bp, synthetic construct
  misc_feature 1..22: note = chemically synthesized
  source 1..22: mol_type = other DNA
ttgccccttctgtcattcacca

SEQ ID NO: 61980 - DNA, 22 bp, synthetic construct
  misc_feature 1..22: note = chemically synthesized
  source 1..22: mol_type = other DNA
tgccccttctgtcattcaccag

SEQ ID NO: 61981 - DNA, 22 bp, synthetic construct
  misc_feature 1..22: note = chemically synthesized
  source 1..22: mol_type = other DNA
gccccttctgtcattcaccagt

SEQ ID NO: 61982 - DNA, 22 bp, synthetic construct
  misc_feature 1..22: note = chemically synthesized
  source 1..22: mol_type = other DNA
ccccttctgtcattcaccagtc

SEQ ID NO: 61983 - DNA, 22 bp, synthetic construct
  misc_feature 1..22: note = chemically synthesized
  source 1..22: mol_type = other DNA
ctgtcattcaccagtcccattt

SEQ ID NO: 61984 - DNA, 22 bp, synthetic construct
  misc_feature 1..22: note = chemically synthesized
  source 1..22: mol_type = other DNA
tgtcattcaccagtcccattta

SEQ ID NO: 61985 - DNA, 22 bp, synthetic construct
  misc_feature 1..22: note = chemically synthesized
  source 1..22: mol_type = other DNA
tcattcaccagtcccatttatg

SEQ ID NO: 61986 - DNA, 22 bp, synthetic construct
  misc_feature 1..22: note = chemically synthesized
  source 1..22: mol_type = other DNA
accagtcccatttatgcctcca

SEQ ID NO: 61987 - DNA, 22 bp, synthetic construct
  misc_feature 1..22: note = chemically synthesized
  source 1..22: mol_type = other DNA
atgcctccaccttggggctcta

SEQ ID NO: 61988 - DNA, 22 bp, synthetic construct
  misc_feature 1..22: note = chemically synthesized
  source 1..22: mol_type = other DNA
tgcctccaccttggggctctac

SEQ ID NO: 61989 - DNA, 22 bp, synthetic construct
  misc_feature 1..22: note = chemically synthesized
  source 1..22: mol_type = other DNA
caccttggggctctaccaggcg

SEQ ID NO: 61990 - DNA, 22 bp, synthetic construct
  misc_feature 1..22: note = chemically synthesized
  source 1..22: mol_type = other DNA
ggggctctaccaggcgagtgac

SEQ ID NO: 61991 - DNA, 22 bp, synthetic construct
  misc_feature 1..22: note = chemically synthesized
  source 1..22: mol_type = other DNA
gggctctaccaggcgagtgacc

SEQ ID NO: 61992 - DNA, 22 bp, synthetic construct
  misc_feature 1..22: note = chemically synthesized
  source 1..22: mol_type = other DNA
taccaggcgagtgacccacagg

SEQ ID NO: 61993 - DNA, 22 bp, synthetic construct
  misc_feature 1..22: note = chemically synthesized
  source 1..22: mol_type = other DNA
ccaggcgagtgacccacaggat

SEQ ID NO: 61994 - DNA, 22 bp, synthetic construct
  misc_feature 1..22: note = chemically synthesized
  source 1..22: mol_type = other DNA
cagcacacacattcagaccagg

SEQ ID NO: 61995 - DNA, 22 bp, synthetic construct
  misc_feature 1..22: note = chemically synthesized
  source 1..22: mol_type = other DNA
agaccagggaacccacttactg

SEQ ID NO: 61996 - DNA, 22 bp, synthetic construct
  misc_feature 1..22: note = chemically synthesized
  source 1..22: mol_type = other DNA
actggctgtgaggcctcaggtg

SEQ ID NO: 61997 - DNA, 22 bp, synthetic construct
  misc_feature 1..22: note = chemically synthesized
  source 1..22: mol_type = other DNA
ctggctgtgaggcctcaggtga

SEQ ID NO: 61998 - DNA, 22 bp, synthetic construct
  misc_feature 1..22: note = chemically synthesized
  source 1..22: mol_type = other DNA
gctgtgaggcctcaggtgagtt

SEQ ID NO: 61999 - DNA, 22 bp, synthetic construct
  misc_feature 1..22: note = chemically synthesized
  source 1..22: mol_type = other DNA
tgaggcctcaggtgagttgttt

SEQ ID NO: 62000 - DNA, 22 bp, synthetic construct
  misc_feature 1..22: note = chemically synthesized
  source 1..22: mol_type = other DNA
aggtgagttgtttaaccgctcc

SEQ ID NO: 62001 - DNA, 22 bp, synthetic construct
  misc_feature 1..22: note = chemically synthesized
  source 1..22: mol_type = other DNA
tttaaccgctccgagcctcaat

SEQ ID NO: 62002 - DNA, 22 bp, synthetic construct
  misc_feature 1..22: note = chemically synthesized
  source 1..22: mol_type = other DNA
aaccgctccgagcctcaatttc

SEQ ID NO: 62003 - DNA, 22 bp, synthetic construct
  misc_feature 1..22: note = chemically synthesized
  source 1..22: mol_type = other DNA
accgctccgagcctcaatttcc

SEQ ID NO: 62004 - DNA, 22 bp, synthetic construct
  misc_feature 1..22: note = chemically synthesized
  source 1..22: mol_type = other DNA
cgagcctcaatttccctatctg

SEQ ID NO: 62005 - DNA, 22 bp, synthetic construct
  misc_feature 1..22: note = chemically synthesized
  source 1..22: mol_type = other DNA
aatttccctatctgtaaaatgg

SEQ ID NO: 62006 - DNA, 22 bp, synthetic construct
  misc_feature 1..22: note = chemically synthesized
  source 1..22: mol_type = other DNA
ccctatctgtaaaatggggatg

SEQ ID NO: 62007 - DNA, 22 bp, synthetic construct
  misc_feature 1..22: note = chemically synthesized
  source 1..22: mol_type = other DNA
cctatctgtaaaatggggatgg

SEQ ID NO: 62008 - DNA, 22 bp, synthetic construct
  misc_feature 1..22: note = chemically synthesized
  source 1..22: mol_type = other DNA
tctgtaaaatggggatggtgac

SEQ ID NO: 62009 - DNA, 22 bp, synthetic construct
  misc_feature 1..22: note = chemically synthesized
  source 1..22: mol_type = other DNA
taaaatggggatggtgacggta

SEQ ID NO: 62010 - DNA, 22 bp, synthetic construct
  misc_feature 1..22: note = chemically synthesized
  source 1..22: mol_type = other DNA
gttgagctgctgtgaggattaa

SEQ ID NO: 62011 - DNA, 22 bp, synthetic construct
  misc_feature 1..22: note = chemically synthesized
  source 1..22: mol_type = other DNA
ttgagctgctgtgaggattaaa

SEQ ID NO: 62012 - DNA, 22 bp, synthetic construct
  misc_feature 1..22: note = chemically synthesized
  source 1..22: mol_type = other DNA
agctgctgtgaggattaaaatg

SEQ ID NO: 62013 - DNA, 22 bp, synthetic construct
  misc_feature 1..22: note = chemically synthesized
  source 1..22: mol_type = other DNA
ctgtgaggattaaaatgcaaca

SEQ ID NO: 62014 - DNA, 22 bp, synthetic construct
  misc_feature 1..22: note = chemically synthesized
  source 1..22: mol_type = other DNA
tgaggattaaaatgcaacagtt

SEQ ID NO: 62015 - DNA, 22 bp, synthetic construct
  misc_feature 1..22: note = chemically synthesized
  source 1..22: mol_type = other DNA
aaatgcaacagttcaaggaaag

SEQ ID NO: 62016 - DNA, 22 bp, synthetic construct
  misc_feature 1..22: note = chemically synthesized
  source 1..22: mol_type = other DNA
aaggaaagctcagagacgggta

SEQ ID NO: 62017 - DNA, 22 bp, synthetic construct
  misc_feature 1..22: note = chemically synthesized
  source 1..22: mol_type = other DNA
agagacgggtactgggtgtgcc

SEQ ID NO: 62018 - DNA, 22 bp, synthetic construct
  misc_feature 1..22: note = chemically synthesized
  source 1..22: mol_type = other DNA
ggtgtgcccagaaagcccctcc

SEQ ID NO: 62019 - DNA, 22 bp, synthetic construct
  misc_feature 1..22: note = chemically synthesized
  source 1..22: mol_type = other DNA
ctgatgctgccctccctccccc

SEQ ID NO: 62020 - DNA, 22 bp, synthetic construct
  misc_feature 1..22: note = chemically synthesized
  source 1..22: mol_type = other DNA
atgctgccctccctcccccgtg

SEQ ID NO: 62021 - DNA, 22 bp, synthetic construct
  misc_feature 1..22: note = chemically synthesized
  source 1..22: mol_type = other DNA
ccctccctcccccgtgtcaggg

SEQ ID NO: 62022 - DNA, 22 bp, synthetic construct
  misc_feature 1..22: note = chemically synthesized
  source 1..22: mol_type = other DNA
cctcccccgtgtcaggggctgg

SEQ ID NO: 62023 - DNA, 22 bp, synthetic construct
  misc_feature 1..22: note = chemically synthesized
  source 1..22: mol_type = other DNA
ccccgtgtcaggggctggtgtc

SEQ ID NO: 62024 - DNA, 22 bp, synthetic construct
  misc_feature 1..22: note = chemically synthesized
  source 1..22: mol_type = other DNA
gtgtcactggggtggggtgggc

SEQ ID NO: 62025 - DNA, 22 bp, synthetic construct
  misc_feature 1..22: note = chemically synthesized
  source 1..22: mol_type = other DNA
gggtggggtgggccacacttga

SEQ ID NO: 62026 - DNA, 22 bp, synthetic construct
  misc_feature 1..22: note = chemically synthesized
  source 1..22: mol_type = other DNA
gaagagctttcctccaggcagt

SEQ ID NO: 62027 - DNA, 22 bp, synthetic construct
  misc_feature 1..22: note = chemically synthesized
  source 1..22: mol_type = other DNA
aagagctttcctccaggcagtc

SEQ ID NO: 62028 - DNA, 22 bp, synthetic construct
  misc_feature 1..22: note = chemically synthesized
  source 1..22: mol_type = other DNA
tcctccaggcagtctctcattc

SEQ ID NO: 62029 - DNA, 22 bp, synthetic construct
  misc_feature 1..22: note = chemically synthesized
  source 1..22: mol_type = other DNA
cctccaggcagtctctcattca

SEQ ID NO: 62030 - DNA, 22 bp, synthetic construct
  misc_feature 1..22: note = chemically synthesized
  source 1..22: mol_type = other DNA
ctccaggcagtctctcattcag

SEQ ID NO: 62031 - DNA, 22 bp, synthetic construct
  misc_feature 1..22: note = chemically synthesized
  source 1..22: mol_type = other DNA
caggcagtctctcattcagtta

SEQ ID NO: 62032 - DNA, 22 bp, synthetic construct
  misc_feature 1..22: note = chemically synthesized
  source 1..22: mol_type = other DNA
tcattcagttaccctgtgaagg

SEQ ID NO: 62033 - DNA, 22 bp, synthetic construct
  misc_feature 1..22: note = chemically synthesized
  source 1..22: mol_type = other DNA
attcagttaccctgtgaaggga

SEQ ID NO: 62034 - DNA, 22 bp, synthetic construct
  misc_feature 1..22: note = chemically synthesized
  source 1..22: mol_type = other DNA
agttaccctgtgaagggagtag

SEQ ID NO: 62035 - DNA, 22 bp, synthetic construct
  misc_feature 1..22: note = chemically synthesized
  source 1..22: mol_type = other DNA
ccctgtgaagggagtaggtacc

SEQ ID NO: 62036 - DNA, 22 bp, synthetic construct
  misc_feature 1..22: note = chemically synthesized
  source 1..22: mol_type = other DNA
tgaagggagtaggtaccaccct

SEQ ID NO: 62037 - DNA, 22 bp, synthetic construct
  misc_feature 1..22: note = chemically synthesized
  source 1..22: mol_type = other DNA
ctttcaggcagcgggaaactga

SEQ ID NO: 62038 - DNA, 22 bp, synthetic construct
  misc_feature 1..22: note = chemically synthesized
  source 1..22: mol_type = other DNA
tcaggcagcgggaaactgagct

SEQ ID NO: 62039 - DNA, 22 bp, synthetic construct
  misc_feature 1..22: note = chemically synthesized
  source 1..22: mol_type = other DNA
caggcagcgggaaactgagctc

SEQ ID NO: 62040 - DNA, 22 bp, synthetic construct
  misc_feature 1..22: note = chemically synthesized
  source 1..22: mol_type = other DNA
aggcagcgggaaactgagctca

SEQ ID NO: 62041 - DNA, 22 bp, synthetic construct
  misc_feature 1..22: note = chemically synthesized
  source 1..22: mol_type = other DNA
agctcagactcccctccccttc

SEQ ID NO: 62042 - DNA, 22 bp, synthetic construct
  misc_feature 1..22: note = chemically synthesized
  source 1..22: mol_type = other DNA
agactcccctccccttctctct

SEQ ID NO: 62043 - DNA, 22 bp, synthetic construct
  misc_feature 1..22: note = chemically synthesized
  source 1..22: mol_type = other DNA
ccctccccttctctctgagctc

SEQ ID NO: 62044 - DNA, 22 bp, synthetic construct
  misc_feature 1..22: note = chemically synthesized
  source 1..22: mol_type = other DNA
cccttctctctgagctcccttc

SEQ ID NO: 62045 - DNA, 22 bp, synthetic construct
  misc_feature 1..22: note = chemically synthesized
  source 1..22: mol_type = other DNA
ctctctgagctcccttccctgc

SEQ ID NO: 62046 - DNA, 22 bp, synthetic construct
  misc_feature 1..22: note = chemically synthesized
  source 1..22: mol_type = other DNA
tctctgagctcccttccctgca

SEQ ID NO: 62047 - DNA, 22 bp, synthetic construct
  misc_feature 1..22: note = chemically synthesized
  source 1..22: mol_type = other DNA
tctgagctcccttccctgcagc

SEQ ID NO: 62048 - DNA, 22 bp, synthetic construct
  misc_feature 1..22: note = chemically synthesized
  source 1..22: mol_type = other DNA
tgagctcccttccctgcagctc

SEQ ID NO: 62049 - DNA, 22 bp, synthetic construct
  misc_feature 1..22: note = chemically synthesized
  source 1..22: mol_type = other DNA
agctcccttccctgcagctcca

SEQ ID NO: 62050 - DNA, 22 bp, synthetic construct
  misc_feature 1..22: note = chemically synthesized
  source 1..22: mol_type = other DNA
ccttccctgcagctccatcccc

SEQ ID NO: 62051 - DNA, 22 bp, synthetic construct
  misc_feature 1..22: note = chemically synthesized
  source 1..22: mol_type = other DNA
ccctgcagctccatcccctggc

SEQ ID NO: 62052 - DNA, 22 bp, synthetic construct
  misc_feature 1..22: note = chemically synthesized
  source 1..22: mol_type = other DNA
cctgcagctccatcccctggct

SEQ ID NO: 62053 - DNA, 22 bp, synthetic construct
  misc_feature 1..22: note = chemically synthesized
  source 1..22: mol_type = other DNA
cagctccatcccctggcttcag

SEQ ID NO: 62054 - DNA, 22 bp, synthetic construct
  misc_feature 1..22: note = chemically synthesized
  source 1..22: mol_type = other DNA
catcccctggcttcagggcccc

SEQ ID NO: 62055 - DNA, 22 bp, synthetic construct
  misc_feature 1..22: note = chemically synthesized
  source 1..22: mol_type = other DNA
gcttcagggcccctgtccttcc

SEQ ID NO: 62056 - DNA, 22 bp, synthetic construct
  misc_feature 1..22: note = chemically synthesized
  source 1..22: mol_type = other DNA
cagggcccctgtccttcccctg

SEQ ID NO: 62057 - DNA, 22 bp, synthetic construct
  misc_feature 1..22: note = chemically synthesized
  source 1..22: mol_type = other DNA
agggcccctgtccttcccctga

SEQ ID NO: 62058 - DNA, 22 bp, synthetic construct
  misc_feature 1..22: note = chemically synthesized
  source 1..22: mol_type = other DNA
tccttcccctgagctggctgaa

SEQ ID NO: 62059 - DNA, 22 bp, synthetic construct
  misc_feature 1..22: note = chemically synthesized
  source 1..22: mol_type = other DNA
cccctgagctggctgaatggat

SEQ ID NO: 62060 - DNA, 22 bp, synthetic construct
  misc_feature 1..22: note = chemically synthesized
  source 1..22: mol_type = other DNA
ccctgagctggctgaatggata

SEQ ID NO: 62061 - DNA, 22 bp, synthetic construct
  misc_feature 1..22: note = chemically synthesized
  source 1..22: mol_type = other DNA
agctggctgaatggatattccg

SEQ ID NO: 62062 - DNA, 22 bp, synthetic construct
  misc_feature 1..22: note = chemically synthesized
  source 1..22: mol_type = other DNA
gctgaatggatattccgctgct

SEQ ID NO: 62063 - DNA, 22 bp, synthetic construct
  misc_feature 1..22: note = chemically synthesized
  source 1..22: mol_type = other DNA
aatggatattccgctgctctac

SEQ ID NO: 62064 - DNA, 22 bp, synthetic construct
  misc_feature 1..22: note = chemically synthesized
  source 1..22: mol_type = other DNA
cgctgctctacatccactcaca

SEQ ID NO: 62065 - DNA, 22 bp, synthetic construct
  misc_feature 1..22: note = chemically synthesized
  source 1..22: mol_type = other DNA
ctctacatccactcacagctcc

SEQ ID NO: 62066 - DNA, 22 bp, synthetic construct
  misc_feature 1..22: note = chemically synthesized
  source 1..22: mol_type = other DNA
tacatccactcacagctccagc

SEQ ID NO: 62067 - DNA, 22 bp, synthetic construct
  misc_feature 1..22: note = chemically synthesized
  source 1..22: mol_type = other DNA
catccactcacagctccagcac

SEQ ID NO: 62068 - DNA, 22 bp, synthetic construct
  misc_feature 1..22: note = chemically synthesized
  source 1..22: mol_type = other DNA
acagctccagcactgggctgtg

SEQ ID NO: 62069 - DNA, 22 bp, synthetic construct
  misc_feature 1..22: note = chemically synthesized
  source 1..22: mol_type = other DNA
cagcactgggctgtggttgagg

SEQ ID NO: 62070 - DNA, 22 bp, synthetic construct
  misc_feature 1..22: note = chemically synthesized
  source 1..22: mol_type = other DNA
ggctgtggttgaggtcgcctgc

SEQ ID NO: 62071 - DNA, 22 bp, synthetic construct
  misc_feature 1..22: note = chemically synthesized
  source 1..22: mol_type = other DNA
tggttgaggtcgcctgccctcg

SEQ ID NO: 62072 - DNA, 22 bp, synthetic construct
  misc_feature 1..22: note = chemically synthesized
  source 1..22: mol_type = other DNA
aggtcgcctgccctcggtagct

SEQ ID NO: 62073 - DNA, 22 bp, synthetic construct
  misc_feature 1..22: note = chemically synthesized
  source 1..22: mol_type = other DNA
ccctcggtagctcctgggcatt

SEQ ID NO: 62074 - DNA, 22 bp, synthetic construct
  misc_feature 1..22: note = chemically synthesized
  source 1..22: mol_type = other DNA
ggtagctcctgggcatttcttc

SEQ ID NO: 62075 - DNA, 22 bp, synthetic construct
  misc_feature 1..22: note = chemically synthesized
  source 1..22: mol_type = other DNA
ctgggcatttcttcccctctct

SEQ ID NO: 62076 - DNA, 22 bp, synthetic construct
  misc_feature 1..22: note = chemically synthesized
  source 1..22: mol_type = other DNA
ggcatttcttcccctctctggg

SEQ ID NO: 62077 - DNA, 22 bp, synthetic construct
  misc_feature 1..22: note = chemically synthesized
  source 1..22: mol_type = other DNA
cttcccctctctgggcctttgt

SEQ ID NO: 62078 - DNA, 22 bp, synthetic construct
  misc_feature 1..22: note = chemically synthesized
  source 1..22: mol_type = other DNA
ttcccctctctgggcctttgtt

SEQ ID NO: 62079 - DNA, 22 bp, synthetic construct
  misc_feature 1..22: note = chemically synthesized
  source 1..22: mol_type = other DNA
cccctctctgggcctttgtttt

SEQ ID NO: 62080 - DNA, 22 bp, synthetic construct
  misc_feature 1..22: note = chemically synthesized
  source 1..22: mol_type = other DNA
ccctctctgggcctttgttttc

SEQ ID NO: 62081 - DNA, 22 bp, synthetic construct
  misc_feature 1..22: note = chemically synthesized
  source 1..22: mol_type = other DNA
tctgggcctttgttttcccatc

SEQ ID NO: 62082 - DNA, 22 bp, synthetic construct
  misc_feature 1..22: note = chemically synthesized
  source 1..22: mol_type = other DNA
tgggcctttgttttcccatctg

SEQ ID NO: 62083 - DNA, 22 bp, synthetic construct
  misc_feature 1..22: note = chemically synthesized
  source 1..22: mol_type = other DNA
ggcctttgttttcccatctgca

SEQ ID NO: 62084 - DNA, 22 bp, synthetic construct
  misc_feature 1..22: note = chemically synthesized
  source 1..22: mol_type = other DNA
tgttttcccatctgcacaatga

SEQ ID NO: 62085 - DNA, 22 bp, synthetic construct
  misc_feature 1..22: note = chemically synthesized
  source 1..22: mol_type = other DNA
gttttcccatctgcacaatgac

SEQ ID NO: 62086 - DNA, 22 bp, synthetic construct
  misc_feature 1..22: note = chemically synthesized
  source 1..22: mol_type = other DNA
ttttcccatctgcacaatgacc

SEQ ID NO: 62087 - DNA, 22 bp, synthetic construct
  misc_feature 1..22: note = chemically synthesized
  source 1..22: mol_type = other DNA
tcccatctgcacaatgaccccc

SEQ ID NO: 62088 - DNA, 22 bp, synthetic construct
  misc_feature 1..22: note = chemically synthesized
  source 1..22: mol_type = other DNA
cccatctgcacaatgaccccca

SEQ ID NO: 62089 - DNA, 22 bp, synthetic construct
  misc_feature 1..22: note = chemically synthesized
  source 1..22: mol_type = other DNA
ccatctgcacaatgacccccac

SEQ ID NO: 62090 - DNA, 22 bp, synthetic construct
  misc_feature 1..22: note = chemically synthesized
  source 1..22: mol_type = other DNA
cacaatgacccccactctaagc

SEQ ID NO: 62091 - DNA, 22 bp, synthetic construct
  misc_feature 1..22: note = chemically synthesized
  source 1..22: mol_type = other DNA
taagccctgctgtccctcccac

SEQ ID NO: 62092 - DNA, 22 bp, synthetic construct
  misc_feature 1..22: note = chemically synthesized
  source 1..22: mol_type = other DNA
agccctgctgtccctcccacct

SEQ ID NO: 62093 - DNA, 22 bp, synthetic construct
  misc_feature 1..22: note = chemically synthesized
  source 1..22: mol_type = other DNA
ctgtccctcccacctgtggaac

SEQ ID NO: 62094 - DNA, 22 bp, synthetic construct
  misc_feature 1..22: note = chemically synthesized
  source 1..22: mol_type = other DNA
tccctcccacctgtggaactga

SEQ ID NO: 62095 - DNA, 22 bp, synthetic construct
  misc_feature 1..22: note = chemically synthesized
  source 1..22: mol_type = other DNA
ccacctgtggaactgagtgagc

SEQ ID NO: 62096 - DNA, 22 bp, synthetic construct
  misc_feature 1..22: note = chemically synthesized
  source 1..22: mol_type = other DNA
tggaactgagtgagcagcagca

SEQ ID NO: 62097 - DNA, 22 bp, synthetic construct
  misc_feature 1..22: note = chemically synthesized
  source 1..22: mol_type = other DNA
agtgagcagcagcagcaatgtc

SEQ ID NO: 62098 - DNA, 22 bp, synthetic construct
  misc_feature 1..22: note = chemically synthesized
  source 1..22: mol_type = other DNA
tcctgctctcctcaagctctcc

SEQ ID NO: 62099 - DNA, 22 bp, synthetic construct
  misc_feature 1..22: note = chemically synthesized
  source 1..22: mol_type = other DNA
cctgctctcctcaagctctcct

SEQ ID NO: 62100 - DNA, 22 bp, synthetic construct
  misc_feature 1..22: note = chemically synthesized
  source 1..22: mol_type = other DNA
ctgctctcctcaagctctcctc

SEQ ID NO: 62101 - DNA, 22 bp, synthetic construct
  misc_feature 1..22: note = chemically synthesized
  source 1..22: mol_type = other DNA
ctctcctcaagctctcctcaag

SEQ ID NO: 62102 - DNA, 22 bp, synthetic construct
  misc_feature 1..22: note = chemically synthesized
  source 1..22: mol_type = other DNA
tcctcaagctctcctcaagctc

SEQ ID NO: 62103 - DNA, 22 bp, synthetic construct
  misc_feature 1..22: note = chemically synthesized
  source 1..22: mol_type = other DNA
ctcaagctctcctcaagctctg

SEQ ID NO: 62104 - DNA, 22 bp, synthetic construct
  misc_feature 1..22: note = chemically synthesized
  source 1..22: mol_type = other DNA
aagctctcctcaagctctgtct

SEQ ID NO: 62105 - DNA, 22 bp, synthetic construct
  misc_feature 1..22: note = chemically synthesized
  source 1..22: mol_type = other DNA
tcctcaagctctgtctcttctg

SEQ ID NO: 62106 - DNA, 22 bp, synthetic construct
  misc_feature 1..22: note = chemically synthesized
  source 1..22: mol_type = other DNA
ctcaagctctgtctcttctggc

SEQ ID NO: 62107 - DNA, 22 bp, synthetic construct
  misc_feature 1..22: note = chemically synthesized
  source 1..22: mol_type = other DNA
aagctctgtctcttctggcagg

SEQ ID NO: 62108 - DNA, 22 bp, synthetic construct
  misc_feature 1..22: note = chemically synthesized
  source 1..22: mol_type = other DNA
tgtctcttctggcaggcacagg

SEQ ID NO: 62109 - DNA, 22 bp, synthetic construct
  misc_feature 1..22: note = chemically synthesized
  source 1..22: mol_type = other DNA
tctcttctggcaggcacaggag

SEQ ID NO: 62110 - DNA, 22 bp, synthetic construct
  misc_feature 1..22: note = chemically synthesized
  source 1..22: mol_type = other DNA
ttctggcaggcacaggagagtg

SEQ ID NO: 62111 - DNA, 22 bp, synthetic construct
  misc_feature 1..22: note = chemically synthesized
  source 1..22: mol_type = other DNA
ctggcaggcacaggagagtggc

SEQ ID NO: 62112 - DNA, 22 bp, synthetic construct
  misc_feature 1..22: note = chemically synthesized
  source 1..22: mol_type = other DNA
tggcaggcacaggagagtggcc

SEQ ID NO: 62113 - DNA, 22 bp, synthetic construct
  misc_feature 1..22: note = chemically synthesized
  source 1..22: mol_type = other DNA
gcaggcacaggagagtggcctg

SEQ ID NO: 62114 - DNA, 22 bp, synthetic construct
  misc_feature 1..22: note = chemically synthesized
  source 1..22: mol_type = other DNA
aaggctggcaggaggttgccgc

SEQ ID NO: 62115 - DNA, 22 bp, synthetic construct
  misc_feature 1..22: note = chemically synthesized
  source 1..22: mol_type = other DNA
gcaggaggttgccgcccctcca

SEQ ID NO: 62116 - DNA, 22 bp, synthetic construct
  misc_feature 1..22: note = chemically synthesized
  source 1..22: mol_type = other DNA
ccgcccctccaacctggaattc

SEQ ID NO: 62117 - DNA, 22 bp, synthetic construct
  misc_feature 1..22: note = chemically synthesized
  source 1..22: mol_type = other DNA
caacctggaattcctggcagca

SEQ ID NO: 62118 - DNA, 22 bp, synthetic construct
  misc_feature 1..22: note = chemically synthesized
  source 1..22: mol_type = other DNA
gaattcctggcagcagcagcgg

SEQ ID NO: 62119 - DNA, 22 bp, synthetic construct
  misc_feature 1..22: note = chemically synthesized
  source 1..22: mol_type = other DNA
ctggcagcagcagcggctaggc

SEQ ID NO: 62120 - DNA, 22 bp, synthetic construct
  misc_feature 1..22: note = chemically synthesized
  source 1..22: mol_type = other DNA
gcagcagcagcggctaggcctt

SEQ ID NO: 62121 - DNA, 22 bp, synthetic construct
  misc_feature 1..22: note = chemically synthesized
  source 1..22: mol_type = other DNA
ggccttcctcggaggcccgacc

SEQ ID NO: 62122 - DNA, 22 bp, synthetic construct
  misc_feature 1..22: note = chemically synthesized
  source 1..22: mol_type = other DNA
cctcggaggcccgaccccctcc

SEQ ID NO: 62123 - DNA, 22 bp, synthetic construct
  misc_feature 1..22: note = chemically synthesized
  source 1..22: mol_type = other DNA
ctcggaggcccgaccccctcct

SEQ ID NO: 62124 - DNA, 22 bp, synthetic construct
  misc_feature 1..22: note = chemically synthesized
  source 1..22: mol_type = other DNA
ggaggcccgaccccctcctcct

SEQ ID NO: 62125 - DNA, 22 bp, synthetic construct
  misc_feature 1..22: note = chemically synthesized
  source 1..22: mol_type = other DNA
ctccttcttggttcagctcagg

SEQ ID NO: 62126 - DNA, 22 bp, synthetic construct
  misc_feature 1..22: note = chemically synthesized
  source 1..22: mol_type = other DNA
cttcttggttcagctcaggact

SEQ ID NO: 62127 - DNA, 22 bp, synthetic construct
  misc_feature 1..22: note = chemically synthesized
  source 1..22: mol_type = other DNA
cttggttcagctcaggactctg

SEQ ID NO: 62128 - DNA, 22 bp, synthetic construct
  misc_feature 1..22: note = chemically synthesized
  source 1..22: mol_type = other DNA
ttggttcagctcaggactctga

SEQ ID NO: 62129 - DNA, 22 bp, synthetic construct
  misc_feature 1..22: note = chemically synthesized
  source 1..22: mol_type = other DNA
ggttcagctcaggactctgagg

SEQ ID NO: 62130 - DNA, 22 bp, synthetic construct
  misc_feature 1..22: note = chemically synthesized
  source 1..22: mol_type = other DNA
gttcagctcaggactctgaggg

SEQ ID NO: 62131 - DNA, 22 bp, synthetic construct
  misc_feature 1..22: note = chemically synthesized
  source 1..22: mol_type = other DNA
agctcaggactctgagggttgc

SEQ ID NO: 62132 - DNA, 22 bp, synthetic construct
  misc_feature 1..22: note = chemically synthesized
  source 1..22: mol_type = other DNA
aggactctgagggttgctgcgt

SEQ ID NO: 62133 - DNA, 22 bp, synthetic construct
  misc_feature 1..22: note = chemically synthesized
  source 1..22: mol_type = other DNA
tgagggttgctgcgtggaggca

SEQ ID NO: 62134 - DNA, 22 bp, synthetic construct
  misc_feature 1..22: note = chemically synthesized
  source 1..22: mol_type = other DNA
agggttgctgcgtggaggcagt

SEQ ID NO: 62135 - DNA, 22 bp, synthetic construct
  misc_feature 1..22: note = chemically synthesized
  source 1..22: mol_type = other DNA
ctgcgtggaggcagtgcatgcc

SEQ ID NO: 62136 - DNA, 22 bp, synthetic construct
  misc_feature 1..22: note = chemically synthesized
  source 1..22: mol_type = other DNA
cgtggaggcagtgcatgccctg

SEQ ID NO: 62137 - DNA, 22 bp, synthetic construct
  misc_feature 1..22: note = chemically synthesized
  source 1..22: mol_type = other DNA
ggcacagtgcccagttcctgcc

SEQ ID NO: 62138 - DNA, 22 bp, synthetic construct
  misc_feature 1..22: note = chemically synthesized
  source 1..22: mol_type = other DNA
ctgcccacccaggaagtagact

SEQ ID NO: 62139 - DNA, 22 bp, synthetic construct
  misc_feature 1..22: note = chemically synthesized
  source 1..22: mol_type = other DNA
cccacccaggaagtagacttcg

SEQ ID NO: 62140 - DNA, 22 bp, synthetic construct
  misc_feature 1..22: note = chemically synthesized
  source 1..22: mol_type = other DNA
cgggtggaggcagtaggctggg

SEQ ID NO: 62141 - DNA, 22 bp, synthetic construct
  misc_feature 1..22: note = chemically synthesized
  source 1..22: mol_type = other DNA
gggtggaggcagtaggctgggg

SEQ ID NO: 62142 - DNA, 22 bp, synthetic construct
  misc_feature 1..22: note = chemically synthesized
  source 1..22: mol_type = other DNA
gggaggggcggggagcttggac

SEQ ID NO: 62143 - DNA, 22 bp, synthetic construct
  misc_feature 1..22: note = chemically synthesized
  source 1..22: mol_type = other DNA
ggacaggaaggagccttgctca

SEQ ID NO: 62144 - DNA, 22 bp, synthetic construct
  misc_feature 1..22: note = chemically synthesized
  source 1..22: mol_type = other DNA
gacaggaaggagccttgctcat

SEQ ID NO: 62145 - DNA, 22 bp, synthetic construct
  misc_feature 1..22: note = chemically synthesized
  source 1..22: mol_type = other DNA
gctcattgcccggcagacacaa

SEQ ID NO: 62146 - DNA, 22 bp, synthetic construct
  misc_feature 1..22: note = chemically synthesized
  source 1..22: mol_type = other DNA
ctcattgcccggcagacacaag

SEQ ID NO: 62147 - DNA, 22 bp, synthetic construct
  misc_feature 1..22: note = chemically synthesized
  source 1..22: mol_type = other DNA
attgcccggcagacacaagact

SEQ ID NO: 62148 - DNA, 22 bp, synthetic construct
  misc_feature 1..22: note = chemically synthesized
  source 1..22: mol_type = other DNA
cccggcagacacaagactgggc

SEQ ID NO: 62149 - DNA, 22 bp, synthetic construct
  misc_feature 1..22: note = chemically synthesized
  source 1..22: mol_type = other DNA
ggccctcataaactcagacagc

SEQ ID NO: 62150 - DNA, 22 bp, synthetic construct
  misc_feature 1..22: note = chemically synthesized
  source 1..22: mol_type = other DNA
ataaactcagacagcccggcat

SEQ ID NO: 62151 - DNA, 22 bp, synthetic construct
  misc_feature 1..22: note = chemically synthesized
  source 1..22: mol_type = other DNA
agacagcccggcatgtcacctg

SEQ ID NO: 62152 - DNA, 22 bp, synthetic construct
  misc_feature 1..22: note = chemically synthesized
  source 1..22: mol_type = other DNA
ttgtacctgccctttcagctct

SEQ ID NO: 62153 - DNA, 22 bp, synthetic construct
  misc_feature 1..22: note = chemically synthesized
  source 1..22: mol_type = other DNA
tacctgccctttcagctctgtg

SEQ ID NO: 62154 - DNA, 22 bp, synthetic construct
  misc_feature 1..22: note = chemically synthesized
  source 1..22: mol_type = other DNA
ccctttcagctctgtgacccgg

SEQ ID NO: 62155 - DNA, 22 bp, synthetic construct
  misc_feature 1..22: note = chemically synthesized
  source 1..22: mol_type = other DNA
tcagctctgtgacccgggacaa

SEQ ID NO: 62156 - DNA, 22 bp, synthetic construct
  misc_feature 1..22: note = chemically synthesized
  source 1..22: mol_type = other DNA
cagctctgtgacccgggacaag

SEQ ID NO: 62157 - DNA, 22 bp, synthetic construct
  misc_feature 1..22: note = chemically synthesized
  source 1..22: mol_type = other DNA
agctctgtgacccgggacaagt

SEQ ID NO: 62158 - DNA, 22 bp, synthetic construct
  misc_feature 1..22: note = chemically synthesized
  source 1..22: mol_type = other DNA
tgtgacccgggacaagtcaccc

SEQ ID NO: 62159 - DNA, 22 bp, synthetic construct
  misc_feature 1..22: note = chemically synthesized
  source 1..22: mol_type = other DNA
tgacccgggacaagtcaccctc

SEQ ID NO: 62160 - DNA, 22 bp, synthetic construct
  misc_feature 1..22: note = chemically synthesized
  source 1..22: mol_type = other DNA
tccctttgagttgccgcaagag

SEQ ID NO: 62161 - DNA, 22 bp, synthetic construct
  misc_feature 1..22: note = chemically synthesized
  source 1..22: mol_type = other DNA
cctttgagttgccgcaagaggt

SEQ ID NO: 62162 - DNA, 22 bp, synthetic construct
  misc_feature 1..22: note = chemically synthesized
  source 1..22: mol_type = other DNA
tgagttgccgcaagaggtacag

SEQ ID NO: 62163 - DNA, 22 bp, synthetic construct
  misc_feature 1..22: note = chemically synthesized
  source 1..22: mol_type = other DNA
gagttgccgcaagaggtacagt

SEQ ID NO: 62164 - DNA, 22 bp, synthetic construct
  misc_feature 1..22: note = chemically synthesized
  source 1..22: mol_type = other DNA
agttgccgcaagaggtacagtc

SEQ ID NO: 62165 - DNA, 22 bp, synthetic construct
  misc_feature 1..22: note = chemically synthesized
  source 1..22: mol_type = other DNA
ccgcaagaggtacagtcacact

SEQ ID NO: 62166 - DNA, 22 bp, synthetic construct
  misc_feature 1..22: note = chemically synthesized
  source 1..22: mol_type = other DNA
cccagaggattactagaaatga

SEQ ID NO: 62167 - DNA, 22 bp, synthetic construct
  misc_feature 1..22: note = chemically synthesized
  source 1..22: mol_type = other DNA
ctagaaatgacaggcctcgccc

SEQ ID NO: 62168 - DNA, 22 bp, synthetic construct
  misc_feature 1..22: note = chemically synthesized
  source 1..22: mol_type = other DNA
gaaatgacaggcctcgccctcc

SEQ ID NO: 62169 - DNA, 22 bp, synthetic construct
  misc_feature 1..22: note = chemically synthesized
  source 1..22: mol_type = other DNA
gccctcctggcacagacctggc

SEQ ID NO: 62170 - DNA, 22 bp, synthetic construct
  misc_feature 1..22: note = chemically synthesized
  source 1..22: mol_type = other DNA
ctggcacagacctggcaccaat

SEQ ID NO: 62171 - DNA, 22 bp, synthetic construct
  misc_feature 1..22: note = chemically synthesized
  source 1..22: mol_type = other DNA
gcacagacctggcaccaataac

SEQ ID NO: 62172 - DNA, 22 bp, synthetic construct
  misc_feature 1..22: note = chemically synthesized
  source 1..22: mol_type = other DNA
gcaccaataactggcaggtttc

SEQ ID NO: 62173 - DNA, 22 bp, synthetic construct
  misc_feature 1..22: note = chemically synthesized
  source 1..22: mol_type = other DNA
gcaggtttctggggccagctgc

SEQ ID NO: 62174 - DNA, 22 bp, synthetic construct
  misc_feature 1..22: note = chemically synthesized
  source 1..22: mol_type = other DNA
ctggggccagctgcagagggaa

SEQ ID NO: 62175 - DNA, 22 bp, synthetic construct
  misc_feature 1..22: note = chemically synthesized
  source 1..22: mol_type = other DNA
tggggccagctgcagagggaag

SEQ ID NO: 62176 - DNA, 22 bp, synthetic construct
  misc_feature 1..22: note = chemically synthesized
  source 1..22: mol_type = other DNA
gggccagctgcagagggaagag

SEQ ID NO: 62177 - DNA, 22 bp, synthetic construct
  misc_feature 1..22: note = chemically synthesized
  source 1..22: mol_type = other DNA
cagagggaagaggactgagcca

SEQ ID NO: 62178 - DNA, 22 bp, synthetic construct
  misc_feature 1..22: note = chemically synthesized
  source 1..22: mol_type = other DNA
agccacctatgaaatgcccagt

SEQ ID NO: 62179 - DNA, 22 bp, synthetic construct
  misc_feature 1..22: note = chemically synthesized
  source 1..22: mol_type = other DNA
tgaaatgcccagtgggcagccc

SEQ ID NO: 62180 - DNA, 22 bp, synthetic construct
  misc_feature 1..22: note = chemically synthesized
  source 1..22: mol_type = other DNA
ggcaggtctgtgtgcactgggg

SEQ ID NO: 62181 - DNA, 22 bp, synthetic construct
  misc_feature 1..22: note = chemically synthesized
  source 1..22: mol_type = other DNA
tgtgcactggggaggtgtgtgt

SEQ ID NO: 62182 - DNA, 22 bp, synthetic construct
  misc_feature 1..22: note = chemically synthesized
  source 1..22: mol_type = other DNA
gggaggtgtgtgtcataggacc

SEQ ID NO: 62183 - DNA, 22 bp, synthetic construct
  misc_feature 1..22: note = chemically synthesized
  source 1..22: mol_type = other DNA
tgacacacacctccccagtgca

SEQ ID NO: 62184 - DNA, 22 bp, synthetic construct
  misc_feature 1..22: note = chemically synthesized
  source 1..22: mol_type = other DNA
cccagtgcacacagacctgccc

SEQ ID NO: 62185 - DNA, 22 bp, synthetic construct
  misc_feature 1..22: note = chemically synthesized
  source 1..22: mol_type = other DNA
cccaactgtggggctgcccact

SEQ ID NO: 62186 - DNA, 22 bp, synthetic construct
  misc_feature 1..22: note = chemically synthesized
  source 1..22: mol_type = other DNA
tggggctgcccactgggcattt

SEQ ID NO: 62187 - DNA, 22 bp, synthetic construct
  misc_feature 1..22: note = chemically synthesized
  source 1..22: mol_type = other DNA
cccactgggcatttcataggtg

SEQ ID NO: 62188 - DNA, 22 bp, synthetic construct
  misc_feature 1..22: note = chemically synthesized
  source 1..22: mol_type = other DNA
ggcatttcataggtggctcagt

SEQ ID NO: 62189 - DNA, 22 bp, synthetic construct
  misc_feature 1..22: note = chemically synthesized
  source 1..22: mol_type = other DNA
cataggtggctcagtcctcttc

SEQ ID NO: 62190 - DNA, 22 bp, synthetic construct
  misc_feature 1..22: note = chemically synthesized
  source 1..22: mol_type = other DNA
ataggtggctcagtcctcttcc

SEQ ID NO: 62191 - DNA, 22 bp, synthetic construct
  misc_feature 1..22: note = chemically synthesized
  source 1..22: mol_type = other DNA
agtcctcttccctctgcagctg

SEQ ID NO: 62192 - DNA, 22 bp, synthetic construct
  misc_feature 1..22: note = chemically synthesized
  source 1..22: mol_type = other DNA
ttccctctgcagctggccccag

SEQ ID NO: 62193 - DNA, 22 bp, synthetic construct
  misc_feature 1..22: note = chemically synthesized
  source 1..22: mol_type = other DNA
ccctctgcagctggccccagaa

SEQ ID NO: 62194 - DNA, 22 bp, synthetic construct
  misc_feature 1..22: note = chemically synthesized
  source 1..22: mol_type = other DNA
cctctgcagctggccccagaaa

SEQ ID NO: 62195 - DNA, 22 bp, synthetic construct
  misc_feature 1..22: note = chemically synthesized
  source 1..22: mol_type = other DNA
tgcagctggccccagaaacctg

SEQ ID NO: 62196 - DNA, 22 bp, synthetic construct
  misc_feature 1..22: note = chemically synthesized
  source 1..22: mol_type = other DNA
cagctggccccagaaacctgcc

SEQ ID NO: 62197 - DNA, 22 bp, synthetic construct
  misc_feature 1..22: note = chemically synthesized
  source 1..22: mol_type = other DNA
gccccagaaacctgccagttat

SEQ ID NO: 62198 - DNA, 22 bp, synthetic construct
  misc_feature 1..22: note = chemically synthesized
  source 1..22: mol_type = other DNA
ccagttattggtgccaggtctg

SEQ ID NO: 62199 - DNA, 22 bp, synthetic construct
  misc_feature 1..22: note = chemically synthesized
  source 1..22: mol_type = other DNA
ttggtgccaggtctgtgccagg

SEQ ID NO: 62200 - DNA, 22 bp, synthetic construct
  misc_feature 1..22: note = chemically synthesized
  source 1..22: mol_type = other DNA
gtgccaggtctgtgccaggagg

SEQ ID NO: 62201 - DNA, 22 bp, synthetic construct
  misc_feature 1..22: note = chemically synthesized
  source 1..22: mol_type = other DNA
tgccaggagggcgaggcctgtc

SEQ ID NO: 62202 - DNA, 22 bp, synthetic construct
  misc_feature 1..22: note = chemically synthesized
  source 1..22: mol_type = other DNA
tcatttctagtaatcctctggg

SEQ ID NO: 62203 - DNA, 22 bp, synthetic construct
  misc_feature 1..22: note = chemically synthesized
  source 1..22: mol_type = other DNA
ctagtaatcctctgggcagtgt

SEQ ID NO: 62204 - DNA, 22 bp, synthetic construct
  misc_feature 1..22: note = chemically synthesized
  source 1..22: mol_type = other DNA
tagtaatcctctgggcagtgtg

SEQ ID NO: 62205 - DNA, 22 bp, synthetic construct
  misc_feature 1..22: note = chemically synthesized
  source 1..22: mol_type = other DNA
gtaatcctctgggcagtgtgac

SEQ ID NO: 62206 - DNA, 22 bp, synthetic construct
  misc_feature 1..22: note = chemically synthesized
  source 1..22: mol_type = other DNA
tgggcagtgtgactgtacctct

SEQ ID NO: 62207 - DNA, 22 bp, synthetic construct
  misc_feature 1..22: note = chemically synthesized
  source 1..22: mol_type = other DNA
ggcagtgtgactgtacctcttg

SEQ ID NO: 62208 - DNA, 22 bp, synthetic construct
  misc_feature 1..22: note = chemically synthesized
  source 1..22: mol_type = other DNA
tacctcttgcggcaactcaaag

SEQ ID NO: 62209 - DNA, 22 bp, synthetic construct
  misc_feature 1..22: note = chemically synthesized
  source 1..22: mol_type = other DNA
ttgcggcaactcaaagggagag

SEQ ID NO: 62210 - DNA, 22 bp, synthetic construct
  misc_feature 1..22: note = chemically synthesized
  source 1..22: mol_type = other DNA
gcggcaactcaaagggagaggg

SEQ ID NO: 62211 - DNA, 22 bp, synthetic construct
  misc_feature 1..22: note = chemically synthesized
  source 1..22: mol_type = other DNA
cggcaactcaaagggagagggt

SEQ ID NO: 62212 - DNA, 22 bp, synthetic construct
  misc_feature 1..22: note = chemically synthesized
  source 1..22: mol_type = other DNA
aaagggagagggtgacttgtcc

SEQ ID NO: 62213 - DNA, 22 bp, synthetic construct
  misc_feature 1..22: note = chemically synthesized
  source 1..22: mol_type = other DNA
gtcccgggtcacagagctgaaa

SEQ ID NO: 62214 - DNA, 22 bp, synthetic construct
  misc_feature 1..22: note = chemically synthesized
  source 1..22: mol_type = other DNA
tcccgggtcacagagctgaaag

SEQ ID NO: 62215 - DNA, 22 bp, synthetic construct
  misc_feature 1..22: note = chemically synthesized
  source 1..22: mol_type = other DNA
aaagggcaggtacaacaggtga

SEQ ID NO: 62216 - DNA, 22 bp, synthetic construct
  misc_feature 1..22: note = chemically synthesized
  source 1..22: mol_type = other DNA
tctgagtttatgagggcccagt

SEQ ID NO: 62217 - DNA, 22 bp, synthetic construct
  misc_feature 1..22: note = chemically synthesized
  source 1..22: mol_type = other DNA
agtttatgagggcccagtcttg

SEQ ID NO: 62218 - DNA, 22 bp, synthetic construct
  misc_feature 1..22: note = chemically synthesized
  source 1..22: mol_type = other DNA
atgagggcccagtcttgtgtct

SEQ ID NO: 62219 - DNA, 22 bp, synthetic construct
  misc_feature 1..22: note = chemically synthesized
  source 1..22: mol_type = other DNA
tgagggcccagtcttgtgtctg

SEQ ID NO: 62220 - DNA, 22 bp, synthetic construct
  misc_feature 1..22: note = chemically synthesized
  source 1..22: mol_type = other DNA
gtgtctgccgggcaatgagcaa

SEQ ID NO: 62221 - DNA, 22 bp, synthetic construct
  misc_feature 1..22: note = chemically synthesized
  source 1..22: mol_type = other DNA
tgtctgccgggcaatgagcaag

SEQ ID NO: 62222 - DNA, 22 bp, synthetic construct
  misc_feature 1..22: note = chemically synthesized
  source 1..22: mol_type = other DNA
ccgggcaatgagcaaggctcct

SEQ ID NO: 62223 - DNA, 22 bp, synthetic construct
  misc_feature 1..22: note = chemically synthesized
  source 1..22: mol_type = other DNA
cttcctgtccaagctccccgcc

SEQ ID NO: 62224 - DNA, 22 bp, synthetic construct
  misc_feature 1..22: note = chemically synthesized
  source 1..22: mol_type = other DNA
cctgtccaagctccccgcccct

SEQ ID NO: 62225 - DNA, 22 bp, synthetic construct
  misc_feature 1..22: note = chemically synthesized
  source 1..22: mol_type = other DNA
ctgtccaagctccccgcccctc

SEQ ID NO: 62226 - DNA, 22 bp, synthetic construct
  misc_feature 1..22: note = chemically synthesized
  source 1..22: mol_type = other DNA
tccaagctccccgcccctcccc

SEQ ID NO: 62227 - DNA, 22 bp, synthetic construct
  misc_feature 1..22: note = chemically synthesized
  source 1..22: mol_type = other DNA
cccgcccctccccagcctactg

SEQ ID NO: 62228 - DNA, 22 bp, synthetic construct
  misc_feature 1..22: note = chemically synthesized
  source 1..22: mol_type = other DNA
cccagcctactgcctccacccg

SEQ ID NO: 62229 - DNA, 22 bp, synthetic construct
  misc_feature 1..22: note = chemically synthesized
  source 1..22: mol_type = other DNA
ctgcctccacccgaagtctact

SEQ ID NO: 62230 - DNA, 22 bp, synthetic construct
  misc_feature 1..22: note = chemically synthesized
  source 1..22: mol_type = other DNA
cctccacccgaagtctacttcc

SEQ ID NO: 62231 - DNA, 22 bp, synthetic construct
  misc_feature 1..22: note = chemically synthesized
  source 1..22: mol_type = other DNA
cacccgaagtctacttcctggg

SEQ ID NO: 62232 - DNA, 22 bp, synthetic construct
  misc_feature 1..22: note = chemically synthesized
  source 1..22: mol_type = other DNA
cttcctgggtgggcaggaactg

SEQ ID NO: 62233 - DNA, 22 bp, synthetic construct
  misc_feature 1..22: note = chemically synthesized
  source 1..22: mol_type = other DNA
cctgggtgggcaggaactgggc

SEQ ID NO: 62234 - DNA, 22 bp, synthetic construct
  misc_feature 1..22: note = chemically synthesized
  source 1..22: mol_type = other DNA
ctgggtgggcaggaactgggca

SEQ ID NO: 62235 - DNA, 22 bp, synthetic construct
  misc_feature 1..22: note = chemically synthesized
  source 1..22: mol_type = other DNA
ggtgggcaggaactgggcactg

SEQ ID NO: 62236 - DNA, 22 bp, synthetic construct
  misc_feature 1..22: note = chemically synthesized
  source 1..22: mol_type = other DNA
ggcactgtgcccagggcatgca

SEQ ID NO: 62237 - DNA, 22 bp, synthetic construct
  misc_feature 1..22: note = chemically synthesized
  source 1..22: mol_type = other DNA
tgcccagggcatgcactgcctc

SEQ ID NO: 62238 - DNA, 22 bp, synthetic construct
  misc_feature 1..22: note = chemically synthesized
  source 1..22: mol_type = other DNA
cctccacgcagcaaccctcaga

SEQ ID NO: 62239 - DNA, 22 bp, synthetic construct
  misc_feature 1..22: note = chemically synthesized
  source 1..22: mol_type = other DNA
cacgcagcaaccctcagagtcc

SEQ ID NO: 62240 - DNA, 22 bp, synthetic construct
  misc_feature 1..22: note = chemically synthesized
  source 1..22: mol_type = other DNA
agagtcctgagctgaaccaaga

SEQ ID NO: 62241 - DNA, 22 bp, synthetic construct
  misc_feature 1..22: note = chemically synthesized
  source 1..22: mol_type = other DNA
agctgaaccaagaaggaggagg

SEQ ID NO: 62242 - DNA, 22 bp, synthetic construct
  misc_feature 1..22: note = chemically synthesized
  source 1..22: mol_type = other DNA
aaccaagaaggaggagggggtc

SEQ ID NO: 62243 - DNA, 22 bp, synthetic construct
  misc_feature 1..22: note = chemically synthesized
  source 1..22: mol_type = other DNA
cgaggaaggcctagccgctgct

SEQ ID NO: 62244 - DNA, 22 bp, synthetic construct
  misc_feature 1..22: note = chemically synthesized
  source 1..22: mol_type = other DNA
gccgctgctgctgccaggaatt

SEQ ID NO: 62245 - DNA, 22 bp, synthetic construct
  misc_feature 1..22: note = chemically synthesized
  source 1..22: mol_type = other DNA
ctgctgccaggaattccaggtt

SEQ ID NO: 62246 - DNA, 22 bp, synthetic construct
  misc_feature 1..22: note = chemically synthesized
  source 1..22: mol_type = other DNA
ctgccaggaattccaggttgga

SEQ ID NO: 62247 - DNA, 22 bp, synthetic construct
  misc_feature 1..22: note = chemically synthesized
  source 1..22: mol_type = other DNA
ccaggaattccaggttggaggg

SEQ ID NO: 62248 - DNA, 22 bp, synthetic construct
  misc_feature 1..22: note = chemically synthesized
  source 1..22: mol_type = other DNA
caggttggaggggcggcaacct

SEQ ID NO: 62249 - DNA, 22 bp, synthetic construct
  misc_feature 1..22: note = chemically synthesized
  source 1..22: mol_type = other DNA
gaggggcggcaacctcctgcca

SEQ ID NO: 62250 - DNA, 22 bp, synthetic construct
  misc_feature 1..22: note = chemically synthesized
  source 1..22: mol_type = other DNA
ctgccagccttcaggccactct

SEQ ID NO: 62251 - DNA, 22 bp, synthetic construct
  misc_feature 1..22: note = chemically synthesized
  source 1..22: mol_type = other DNA
ccagccttcaggccactctcct

SEQ ID NO: 62252 - DNA, 22 bp, synthetic construct
  misc_feature 1..22: note = chemically synthesized
  source 1..22: mol_type = other DNA
caggccactctcctgtgcctgc

SEQ ID NO: 62253 - DNA, 22 bp, synthetic construct
  misc_feature 1..22: note = chemically synthesized
  source 1..22: mol_type = other DNA
aggccactctcctgtgcctgcc

SEQ ID NO: 62254 - DNA, 22 bp, synthetic construct
  misc_feature 1..22: note = chemically synthesized
  source 1..22: mol_type = other DNA
tcctgtgcctgccagaagagac

SEQ ID NO: 62255 - DNA, 22 bp, synthetic construct
  misc_feature 1..22: note = chemically synthesized
  source 1..22: mol_type = other DNA
ctgtgcctgccagaagagacag

SEQ ID NO: 62256 - DNA, 22 bp, synthetic construct
  misc_feature 1..22: note = chemically synthesized
  source 1..22: mol_type = other DNA
tgcctgccagaagagacagagc

SEQ ID NO: 62257 - DNA, 22 bp, synthetic construct
  misc_feature 1..22: note = chemically synthesized
  source 1..22: mol_type = other DNA
ccagaagagacagagcttgagg

SEQ ID NO: 62258 - DNA, 22 bp, synthetic construct
  misc_feature 1..22: note = chemically synthesized
  source 1..22: mol_type = other DNA
gaggagagcttgaggagagcag

SEQ ID NO: 62259 - DNA, 22 bp, synthetic construct
  misc_feature 1..22: note = chemically synthesized
  source 1..22: mol_type = other DNA
aggagagcttgaggagagcagg

SEQ ID NO: 62260 - DNA, 22 bp, synthetic construct
  misc_feature 1..22: note = chemically synthesized
  source 1..22: mol_type = other DNA
gaggagagcaggaaaggtggga

SEQ ID NO: 62261 - DNA, 22 bp, synthetic construct
  misc_feature 1..22: note = chemically synthesized
  source 1..22: mol_type = other DNA
aggagagcaggaaaggtgggac

SEQ ID NO: 62262 - DNA, 22 bp, synthetic construct
  misc_feature 1..22: note = chemically synthesized
  source 1..22: mol_type = other DNA
ctgctgctgctcactcagttcc

SEQ ID NO: 62263 - DNA, 22 bp, synthetic construct
  misc_feature 1..22: note = chemically synthesized
  source 1..22: mol_type = other DNA
ctgctgctcactcagttccaca

SEQ ID NO: 62264 - DNA, 22 bp, synthetic construct
  misc_feature 1..22: note = chemically synthesized
  source 1..22: mol_type = other DNA
ctgctcactcagttccacaggt

SEQ ID NO: 62265 - DNA, 22 bp, synthetic construct
  misc_feature 1..22: note = chemically synthesized
  source 1..22: mol_type = other DNA
ctcactcagttccacaggtggg

SEQ ID NO: 62266 - DNA, 22 bp, synthetic construct
  misc_feature 1..22: note = chemically synthesized
  source 1..22: mol_type = other DNA
actcagttccacaggtgggagg

SEQ ID NO: 62267 - DNA, 22 bp, synthetic construct
  misc_feature 1..22: note = chemically synthesized
  source 1..22: mol_type = other DNA
agttccacaggtgggagggaca

SEQ ID NO: 62268 - DNA, 22 bp, synthetic construct
  misc_feature 1..22: note = chemically synthesized
  source 1..22: mol_type = other DNA
cacaggtgggagggacagcagg

SEQ ID NO: 62269 - DNA, 22 bp, synthetic construct
  misc_feature 1..22: note = chemically synthesized
  source 1..22: mol_type = other DNA
agagtgggggtcattgtgcaga

SEQ ID NO: 62270 - DNA, 22 bp, synthetic construct
  misc_feature 1..22: note = chemically synthesized
  source 1..22: mol_type = other DNA
gagtgggggtcattgtgcagat

SEQ ID NO: 62271 - DNA, 22 bp, synthetic construct
  misc_feature 1..22: note = chemically synthesized
  source 1..22: mol_type = other DNA
tgcagatgggaaaacaaaggcc

SEQ ID NO: 62272 - DNA, 22 bp, synthetic construct
  misc_feature 1..22: note = chemically synthesized
  source 1..22: mol_type = other DNA
ccgagggcaggcgacctcaacc

SEQ ID NO: 62273 - DNA, 22 bp, synthetic construct
  misc_feature 1..22: note = chemically synthesized
  source 1..22: mol_type = other DNA
aaccacagcccagtgctggagc

SEQ ID NO: 62274 - DNA, 22 bp, synthetic construct
  misc_feature 1..22: note = chemically synthesized
  source 1..22: mol_type = other DNA
gagctgtgagtggatgtagagc

SEQ ID NO: 62275 - DNA, 22 bp, synthetic construct
  misc_feature 1..22: note = chemically synthesized
  source 1..22: mol_type = other DNA
tgagtggatgtagagcagcgga

SEQ ID NO: 62276 - DNA, 22 bp, synthetic construct
  misc_feature 1..22: note = chemically synthesized
  source 1..22: mol_type = other DNA
agccagctcaggggaaggacag

SEQ ID NO: 62277 - DNA, 22 bp, synthetic construct
  misc_feature 1..22: note = chemically synthesized
  source 1..22: mol_type = other DNA
aggggaaggacaggggccctga

SEQ ID NO: 62278 - DNA, 22 bp, synthetic construct
  misc_feature 1..22: note = chemically synthesized
  source 1..22: mol_type = other DNA
aagccaggggatggagctgcag

SEQ ID NO: 62279 - DNA, 22 bp, synthetic construct
  misc_feature 1..22: note = chemically synthesized
  source 1..22: mol_type = other DNA
cagggaagggagctcagagaga

SEQ ID NO: 62280 - DNA, 22 bp, synthetic construct
  misc_feature 1..22: note = chemically synthesized
  source 1..22: mol_type = other DNA
agagagaaggggaggggagtct

SEQ ID NO: 62281 - DNA, 22 bp, synthetic construct
  misc_feature 1..22: note = chemically synthesized
  source 1..22: mol_type = other DNA
agctcagtttcccgctgcctga

SEQ ID NO: 62282 - DNA, 22 bp, synthetic construct
  misc_feature 1..22: note = chemically synthesized
  source 1..22: mol_type = other DNA
agtttcccgctgcctgaaagga

SEQ ID NO: 62283 - DNA, 22 bp, synthetic construct
  misc_feature 1..22: note = chemically synthesized
  source 1..22: mol_type = other DNA
cccgctgcctgaaaggagggtg

SEQ ID NO: 62284 - DNA, 22 bp, synthetic construct
  misc_feature 1..22: note = chemically synthesized
  source 1..22: mol_type = other DNA
ccgctgcctgaaaggagggtgg

SEQ ID NO: 62285 - DNA, 22 bp, synthetic construct
  misc_feature 1..22: note = chemically synthesized
  source 1..22: mol_type = other DNA
cctgaaaggagggtggtaccta

SEQ ID NO: 62286 - DNA, 22 bp, synthetic construct
  misc_feature 1..22: note = chemically synthesized
  source 1..22: mol_type = other DNA
aaaggagggtggtacctactcc

SEQ ID NO: 62287 - DNA, 22 bp, synthetic construct
  misc_feature 1..22: note = chemically synthesized
  source 1..22: mol_type = other DNA
ctcccttcacagggtaactgaa

SEQ ID NO: 62288 - DNA, 22 bp, synthetic construct
  misc_feature 1..22: note = chemically synthesized
  source 1..22: mol_type = other DNA
ccttcacagggtaactgaatga

SEQ ID NO: 62289 - DNA, 22 bp, synthetic construct
  misc_feature 1..22: note = chemically synthesized
  source 1..22: mol_type = other DNA
cacagggtaactgaatgagaga

SEQ ID NO: 62290 - DNA, 22 bp, synthetic construct
  misc_feature 1..22: note = chemically synthesized
  source 1..22: mol_type = other DNA
acagggtaactgaatgagagac

SEQ ID NO: 62291 - DNA, 22 bp, synthetic construct
  misc_feature 1..22: note = chemically synthesized
  source 1..22: mol_type = other DNA
aatgagagactgcctggaggaa

SEQ ID NO: 62292 - DNA, 22 bp, synthetic construct
  misc_feature 1..22: note = chemically synthesized
  source 1..22: mol_type = other DNA
cctggaggaaagctcttcaagt

SEQ ID NO: 62293 - DNA, 22 bp, synthetic construct
  misc_feature 1..22: note = chemically synthesized
  source 1..22: mol_type = other DNA
gaggaaagctcttcaagtgtgg

SEQ ID NO: 62294 - DNA, 22 bp, synthetic construct
  misc_feature 1..22: note = chemically synthesized
  source 1..22: mol_type = other DNA
ttcaagtgtggcccaccccacc

SEQ ID NO: 62295 - DNA, 22 bp, synthetic construct
  misc_feature 1..22: note = chemically synthesized
  source 1..22: mol_type = other DNA
caagtgtggcccaccccacccc

SEQ ID NO: 62296 - DNA, 22 bp, synthetic construct
  misc_feature 1..22: note = chemically synthesized
  source 1..22: mol_type = other DNA
aagtgtggcccaccccacccca

SEQ ID NO: 62297 - DNA, 22 bp, synthetic construct
  misc_feature 1..22: note = chemically synthesized
  source 1..22: mol_type = other DNA
acacgggggagggagggcagca

SEQ ID NO: 62298 - DNA, 22 bp, synthetic construct
  misc_feature 1..22: note = chemically synthesized
  source 1..22: mol_type = other DNA
tctgggcacacccagtacccgt

SEQ ID NO: 62299 - DNA, 22 bp, synthetic construct
  misc_feature 1..22: note = chemically synthesized
  source 1..22: mol_type = other DNA
ctgggcacacccagtacccgtc

SEQ ID NO: 62300 - DNA, 22 bp, synthetic construct
  misc_feature 1..22: note = chemically synthesized
  source 1..22: mol_type = other DNA
tgggcacacccagtacccgtct

SEQ ID NO: 62301 - DNA, 22 bp, synthetic construct
  misc_feature 1..22: note = chemically synthesized
  source 1..22: mol_type = other DNA
ggcacacccagtacccgtctct

SEQ ID NO: 62302 - DNA, 22 bp, synthetic construct
  misc_feature 1..22: note = chemically synthesized
  source 1..22: mol_type = other DNA
tgagctttccttgaactgttgc

SEQ ID NO: 62303 - DNA, 22 bp, synthetic construct
  misc_feature 1..22: note = chemically synthesized
  source 1..22: mol_type = other DNA
agctttccttgaactgttgcat

SEQ ID NO: 62304 - DNA, 22 bp, synthetic construct
  misc_feature 1..22: note = chemically synthesized
  source 1..22: mol_type = other DNA
tccttgaactgttgcattttaa

SEQ ID NO: 62305 - DNA, 22 bp, synthetic construct
  misc_feature 1..22: note = chemically synthesized
  source 1..22: mol_type = other DNA
ccttgaactgttgcattttaat

SEQ ID NO: 62306 - DNA, 22 bp, synthetic construct
  misc_feature 1..22: note = chemically synthesized
  source 1..22: mol_type = other DNA
cttgaactgttgcattttaatc

SEQ ID NO: 62307 - DNA, 22 bp, synthetic construct
  misc_feature 1..22: note = chemically synthesized
  source 1..22: mol_type = other DNA
gaactgttgcattttaatcctc

SEQ ID NO: 62308 - DNA, 22 bp, synthetic construct
  misc_feature 1..22: note = chemically synthesized
  source 1..22: mol_type = other DNA
aactgttgcattttaatcctca

SEQ ID NO: 62309 - DNA, 22 bp, synthetic construct
  misc_feature 1..22: note = chemically synthesized
  source 1..22: mol_type = other DNA
ttgcattttaatcctcacagca

SEQ ID NO: 62310 - DNA, 22 bp, synthetic construct
  misc_feature 1..22: note = chemically synthesized
  source 1..22: mol_type = other DNA
cattttaatcctcacagcagct

SEQ ID NO: 62311 - DNA, 22 bp, synthetic construct
  misc_feature 1..22: note = chemically synthesized
  source 1..22: mol_type = other DNA
taatcctcacagcagctcaaca

SEQ ID NO: 62312 - DNA, 22 bp, synthetic construct
  misc_feature 1..22: note = chemically synthesized
  source 1..22: mol_type = other DNA
aatcctcacagcagctcaacaa

SEQ ID NO: 62313 - DNA, 22 bp, synthetic construct
  misc_feature 1..22: note = chemically synthesized
  source 1..22: mol_type = other DNA
atcctcacagcagctcaacaag

SEQ ID NO: 62314 - DNA, 22 bp, synthetic construct
  misc_feature 1..22: note = chemically synthesized
  source 1..22: mol_type = other DNA
acagcagctcaacaaggtacat

SEQ ID NO: 62315 - DNA, 22 bp, synthetic construct
  misc_feature 1..22: note = chemically synthesized
  source 1..22: mol_type = other DNA
aacaaggtacataccgtcacca

SEQ ID NO: 62316 - DNA, 22 bp, synthetic construct
  misc_feature 1..22: note = chemically synthesized
  source 1..22: mol_type = other DNA
tacagatagggaaattgaggct

SEQ ID NO: 62317 - DNA, 22 bp, synthetic construct
  misc_feature 1..22: note = chemically synthesized
  source 1..22: mol_type = other DNA
acagatagggaaattgaggctc

SEQ ID NO: 62318 - DNA, 22 bp, synthetic construct
  misc_feature 1..22: note = chemically synthesized
  source 1..22: mol_type = other DNA
cagatagggaaattgaggctcg

SEQ ID NO: 62319 - DNA, 22 bp, synthetic construct
  misc_feature 1..22: note = chemically synthesized
  source 1..22: mol_type = other DNA
aggctcggagcggttaaacaac

SEQ ID NO: 62320 - DNA, 22 bp, synthetic construct
  misc_feature 1..22: note = chemically synthesized
  source 1..22: mol_type = other DNA
ggagcggttaaacaactcacct

SEQ ID NO: 62321 - DNA, 22 bp, synthetic construct
  misc_feature 1..22: note = chemically synthesized
  source 1..22: mol_type = other DNA
aacaactcacctgaggcctcac

SEQ ID NO: 62322 - DNA, 22 bp, synthetic construct
  misc_feature 1..22: note = chemically synthesized
  source 1..22: mol_type = other DNA
acctgaggcctcacagccagta

SEQ ID NO: 62323 - DNA, 22 bp, synthetic construct
  misc_feature 1..22: note = chemically synthesized
  source 1..22: mol_type = other DNA
aggcctcacagccagtaagtgg

SEQ ID NO: 62324 - DNA, 22 bp, synthetic construct
  misc_feature 1..22: note = chemically synthesized
  source 1..22: mol_type = other DNA
acagccagtaagtgggttccct

SEQ ID NO: 62325 - DNA, 22 bp, synthetic construct
  misc_feature 1..22: note = chemically synthesized
  source 1..22: mol_type = other DNA
cctggtctgaatgtgtgtgctg

SEQ ID NO: 62326 - DNA, 22 bp, synthetic construct
  misc_feature 1..22: note = chemically synthesized
  source 1..22: mol_type = other DNA
gtctgaatgtgtgtgctggagg

SEQ ID NO: 62327 - DNA, 22 bp, synthetic construct
  misc_feature 1..22: note = chemically synthesized
  source 1..22: mol_type = other DNA
aatgtgtgtgctggaggatcct

SEQ ID NO: 62328 - DNA, 22 bp, synthetic construct
  misc_feature 1..22: note = chemically synthesized
  source 1..22: mol_type = other DNA
gaggatcctgtgggtcactcgc

SEQ ID NO: 62329 - DNA, 22 bp, synthetic construct
  misc_feature 1..22: note = chemically synthesized
  source 1..22: mol_type = other DNA
tgggtcactcgcctggtagagc

SEQ ID NO: 62330 - DNA, 22 bp, synthetic construct
  misc_feature 1..22: note = chemically synthesized
  source 1..22: mol_type = other DNA
gcctggtagagccccaaggtgg

SEQ ID NO: 62331 - DNA, 22 bp, synthetic construct
  misc_feature 1..22: note = chemically synthesized
  source 1..22: mol_type = other DNA
gtagagccccaaggtggaggca

SEQ ID NO: 62332 - DNA, 22 bp, synthetic construct
  misc_feature 1..22: note = chemically synthesized
  source 1..22: mol_type = other DNA
gtgaatgacagaaggggcaaaa

SEQ ID NO: 62333 - DNA, 22 bp, synthetic construct
  misc_feature 1..22: note = chemically synthesized
  source 1..22: mol_type = other DNA
atccattcactctgcaagtatc

SEQ ID NO: 62334 - DNA, 22 bp, synthetic construct
  misc_feature 1..22: note = chemically synthesized
  source 1..22: mol_type = other DNA
actctgcaagtatctacggcac

SEQ ID NO: 62335 - DNA, 22 bp, synthetic construct
  misc_feature 1..22: note = chemically synthesized
  source 1..22: mol_type = other DNA
tgcaagtatctacggcacgtac

SEQ ID NO: 62336 - DNA, 22 bp, synthetic construct
  misc_feature 1..22: note = chemically synthesized
  source 1..22: mol_type = other DNA
caagtatctacggcacgtacgc

SEQ ID NO: 62337 - DNA, 22 bp, synthetic construct
  misc_feature 1..22: note = chemically synthesized
  source 1..22: mol_type = other DNA
cggcacgtacgccagctcccaa

SEQ ID NO: 62338 - DNA, 22 bp, synthetic construct
  misc_feature 1..22: note = chemically synthesized
  source 1..22: mol_type = other DNA
ccaagcaggtttgcgggttgca

SEQ ID NO: 62339 - DNA, 22 bp, synthetic construct
  misc_feature 1..22: note = chemically synthesized
  source 1..22: mol_type = other DNA
gcgggttgcacagcgggcgatg

SEQ ID NO: 62340 - DNA, 22 bp, synthetic construct
  misc_feature 1..22: note = chemically synthesized
  source 1..22: mol_type = other DNA
cgggttgcacagcgggcgatgc

SEQ ID NO: 62341 - DNA, 22 bp, synthetic construct
  misc_feature 1..22: note = chemically synthesized
  source 1..22: mol_type = other DNA
cacagcgggcgatgcaatctga

SEQ ID NO: 62342 - DNA, 22 bp, synthetic construct
  misc_feature 1..22: note = chemically synthesized
  source 1..22: mol_type = other DNA
atttaggcttttaaagggattg

SEQ ID NO: 62343 - DNA, 22 bp, synthetic construct
  misc_feature 1..22: note = chemically synthesized
  source 1..22: mol_type = other DNA
aggcttttaaagggattgcaat

SEQ ID NO: 62344 - DNA, 22 bp, synthetic construct
  misc_feature 1..22: note = chemically synthesized
  source 1..22: mol_type = other DNA
ggcttttaaagggattgcaatc

SEQ ID NO: 62345 - DNA, 22 bp, synthetic construct
  misc_feature 1..22: note = chemically synthesized
  source 1..22: mol_type = other DNA
ttaaagggattgcaatcaagtg

SEQ ID NO: 62346 - DNA, 22 bp, synthetic construct
  misc_feature 1..22: note = chemically synthesized
  source 1..22: mol_type = other DNA
taaagggattgcaatcaagtgg

SEQ ID NO: 62347 - DNA, 22 bp, synthetic construct
  misc_feature 1..22: note = chemically synthesized
  source 1..22: mol_type = other DNA
aaagggattgcaatcaagtggg

SEQ ID NO: 62348 - DNA, 22 bp, synthetic construct
  misc_feature 1..22: note = chemically synthesized
  source 1..22: mol_type = other DNA
aagggattgcaatcaagtgggg

SEQ ID NO: 62349 - DNA, 22 bp, synthetic construct
  misc_feature 1..22: note = chemically synthesized
  source 1..22: mol_type = other DNA
caatcaagtggggccccactag

SEQ ID NO: 62350 - DNA, 22 bp, synthetic construct
  misc_feature 1..22: note = chemically synthesized
  source 1..22: mol_type = other DNA
gcctcaaccctgtacctcccct

SEQ ID NO: 62351 - DNA, 22 bp, synthetic construct
  misc_feature 1..22: note = chemically synthesized
  source 1..22: mol_type = other DNA
aaccctgtacctcccctcccct

SEQ ID NO: 62352 - DNA, 22 bp, synthetic construct
  misc_feature 1..22: note = chemically synthesized
  source 1..22: mol_type = other DNA
tacctcccctcccctccacccc

SEQ ID NO: 62353 - DNA, 22 bp, synthetic construct
  misc_feature 1..22: note = chemically synthesized
  source 1..22: mol_type = other DNA
ccctcccctccacccccagcag

SEQ ID NO: 62354 - DNA, 22 bp, synthetic construct
  misc_feature 1..22: note = chemically synthesized
  source 1..22: mol_type = other DNA
ccctccacccccagcagtctcc

SEQ ID NO: 62355 - DNA, 22 bp, synthetic construct
  misc_feature 1..22: note = chemically synthesized
  source 1..22: mol_type = other DNA
cacccccagcagtctccaaagg

SEQ ID NO: 62356 - DNA, 22 bp, synthetic construct
  misc_feature 1..22: note = chemically synthesized
  source 1..22: mol_type = other DNA
caaaggcctccaacaaccccag

SEQ ID NO: 62357 - DNA, 22 bp, synthetic construct
  misc_feature 1..22: note = chemically synthesized
  source 1..22: mol_type = other DNA
caacaaccccagagtgggggcc

SEQ ID NO: 62358 - DNA, 22 bp, synthetic construct
  misc_feature 1..22: note = chemically synthesized
  source 1..22: mol_type = other DNA
caagctgtatacggatcacact

SEQ ID NO: 62359 - DNA, 22 bp, synthetic construct
  misc_feature 1..22: note = chemically synthesized
  source 1..22: mol_type = other DNA
tatacggatcacactggttttc

SEQ ID NO: 62360 - DNA, 22 bp, synthetic construct
  misc_feature 1..22: note = chemically synthesized
  source 1..22: mol_type = other DNA
gttttccaggagcaaaaacaga

SEQ ID NO: 62361 - DNA, 22 bp, synthetic construct
  misc_feature 1..22: note = chemically synthesized
  source 1..22: mol_type = other DNA
tccaggagcaaaaacagaaaca

SEQ ID NO: 62362 - DNA, 22 bp, synthetic construct
  misc_feature 1..22: note = chemically synthesized
  source 1..22: mol_type = other DNA
ccaggagcaaaaacagaaacag

SEQ ID NO: 62363 - DNA, 22 bp, synthetic construct
  misc_feature 1..22: note = chemically synthesized
  source 1..22: mol_type = other DNA
caggagcaaaaacagaaacagg

SEQ ID NO: 62364 - DNA, 22 bp, synthetic construct
  misc_feature 1..22: note = chemically synthesized
  source 1..22: mol_type = other DNA
aggctggtcaaaattgaacctc

SEQ ID NO: 62365 - DNA, 22 bp, synthetic construct
  misc_feature 1..22: note = chemically synthesized
  source 1..22: mol_type = other DNA
gtcaaaattgaacctcctcctg

SEQ ID NO: 62366 - DNA, 22 bp, synthetic construct
  misc_feature 1..22: note = chemically synthesized
  source 1..22: mol_type = other DNA
aacctcctcctgctctgagcag

SEQ ID NO: 62367 - DNA, 22 bp, synthetic construct
  misc_feature 1..22: note = chemically synthesized
  source 1..22: mol_type = other DNA
ctcctgctctgagcagcctggg

SEQ ID NO: 62368 - DNA, 22 bp, synthetic construct
  misc_feature 1..22: note = chemically synthesized
  source 1..22: mol_type = other DNA
ctgctctgagcagcctgggggg

SEQ ID NO: 62369 - DNA, 22 bp, synthetic construct
  misc_feature 1..22: note = chemically synthesized
  source 1..22: mol_type = other DNA
ctctgagcagcctggggggcag

SEQ ID NO: 62370 - DNA, 22 bp, synthetic construct
  misc_feature 1..22: note = chemically synthesized
  source 1..22: mol_type = other DNA
tgagcagcctggggggcagact

SEQ ID NO: 62371 - DNA, 22 bp, synthetic construct
  misc_feature 1..22: note = chemically synthesized
  source 1..22: mol_type = other DNA
agcagcctggggggcagactaa

SEQ ID NO: 62372 - DNA, 22 bp, synthetic construct
  misc_feature 1..22: note = chemically synthesized
  source 1..22: mol_type = other DNA
gggggcagactaagcagagggc

SEQ ID NO: 62373 - DNA, 22 bp, synthetic construct
  misc_feature 1..22: note = chemically synthesized
  source 1..22: mol_type = other DNA
agcagagggctgtgcagaccca

SEQ ID NO: 62374 - DNA, 22 bp, synthetic construct
  misc_feature 1..22: note = chemically synthesized
  source 1..22: mol_type = other DNA
tgcagacccacataaagagcct

SEQ ID NO: 62375 - DNA, 22 bp, synthetic construct
  misc_feature 1..22: note = chemically synthesized
  source 1..22: mol_type = other DNA
ctgtgtgccaggcacttcaccc

SEQ ID NO: 62376 - DNA, 22 bp, synthetic construct
  misc_feature 1..22: note = chemically synthesized
  source 1..22: mol_type = other DNA
tgtgccaggcacttcacccgag

SEQ ID NO: 62377 - DNA, 22 bp, synthetic construct
  misc_feature 1..22: note = chemically synthesized
  source 1..22: mol_type = other DNA
cacccgaggcacttcacaagca

SEQ ID NO: 62378 - DNA, 22 bp, synthetic construct
  misc_feature 1..22: note = chemically synthesized
  source 1..22: mol_type = other DNA
acccgaggcacttcacaagcat

SEQ ID NO: 62379 - DNA, 22 bp, synthetic construct
  misc_feature 1..22: note = chemically synthesized
  source 1..22: mol_type = other DNA
cacaagcatgcttgggaatgaa

SEQ ID NO: 62380 - DNA, 22 bp, synthetic construct
  misc_feature 1..22: note = chemically synthesized
  source 1..22: mol_type = other DNA
acaagcatgcttgggaatgaaa

SEQ ID NO: 62381 - DNA, 22 bp, synthetic construct
  misc_feature 1..22: note = chemically synthesized
  source 1..22: mol_type = other DNA
gggaatgaaacttccaactctt

SEQ ID NO: 62382 - DNA, 22 bp, synthetic construct
  misc_feature 1..22: note = chemically synthesized
  source 1..22: mol_type = other DNA
ggaatgaaacttccaactcttt

SEQ ID NO: 62383 - DNA, 22 bp, synthetic construct
  misc_feature 1..22: note = chemically synthesized
  source 1..22: mol_type = other DNA
ccaactctttgggatgcaggtg

SEQ ID NO: 62384 - DNA, 22 bp, synthetic construct
  misc_feature 1..22: note = chemically synthesized
  source 1..22: mol_type = other DNA
caactctttgggatgcaggtga

SEQ ID NO: 62385 - DNA, 22 bp, synthetic construct
  misc_feature 1..22: note = chemically synthesized
  source 1..22: mol_type = other DNA
tttgggatgcaggtgaaacagt

SEQ ID NO: 62386 - DNA, 22 bp, synthetic construct
  misc_feature 1..22: note = chemically synthesized
  source 1..22: mol_type = other DNA
tgggatgcaggtgaaacagttc

SEQ ID NO: 62387 - DNA, 22 bp, synthetic construct
  misc_feature 1..22: note = chemically synthesized
  source 1..22: mol_type = other DNA
gggatgcaggtgaaacagttcc

SEQ ID NO: 62388 - DNA, 22 bp, synthetic construct
  misc_feature 1..22: note = chemically synthesized
  source 1..22: mol_type = other DNA
ggatgcaggtgaaacagttcct

SEQ ID NO: 62389 - DNA, 22 bp, synthetic construct
  misc_feature 1..22: note = chemically synthesized
  source 1..22: mol_type = other DNA
ctggttcagagaggtgaagcgg

SEQ ID NO: 62390 - DNA, 22 bp, synthetic construct
  misc_feature 1..22: note = chemically synthesized
  source 1..22: mol_type = other DNA
gttcagagaggtgaagcggcct

SEQ ID NO: 62391 - DNA, 22 bp, synthetic construct
  misc_feature 1..22: note = chemically synthesized
  source 1..22: mol_type = other DNA
agagaggtgaagcggcctgcct

SEQ ID NO: 62392 - DNA, 22 bp, synthetic construct
  misc_feature 1..22: note = chemically synthesized
  source 1..22: mol_type = other DNA
cctgaggcagcacagctcttct

SEQ ID NO: 62393 - DNA, 22 bp, synthetic construct
  misc_feature 1..22: note = chemically synthesized
  source 1..22: mol_type = other DNA
aggcagcacagctcttctttac

SEQ ID NO: 62394 - DNA, 22 bp, synthetic construct
  misc_feature 1..22: note = chemically synthesized
  source 1..22: mol_type = other DNA
ttctttacagatgtgcttcccc

SEQ ID NO: 62395 - DNA, 22 bp, synthetic construct
  misc_feature 1..22: note = chemically synthesized
  source 1..22: mol_type = other DNA
ctttacagatgtgcttccccac

SEQ ID NO: 62396 - DNA, 22 bp, synthetic construct
  misc_feature 1..22: note = chemically synthesized
  source 1..22: mol_type = other DNA
tttacagatgtgcttccccacc

SEQ ID NO: 62397 - DNA, 22 bp, synthetic construct
  misc_feature 1..22: note = chemically synthesized
  source 1..22: mol_type = other DNA
tacagatgtgcttccccacctc

SEQ ID NO: 62398 - DNA, 22 bp, synthetic construct
  misc_feature 1..22: note = chemically synthesized
  source 1..22: mol_type = other DNA
acagatgtgcttccccacctct

SEQ ID NO: 62399 - DNA, 22 bp, synthetic construct
  misc_feature 1..22: note = chemically synthesized
  source 1..22: mol_type = other DNA
cagatgtgcttccccacctcta

SEQ ID NO: 62400 - DNA, 22 bp, synthetic construct
  misc_feature 1..22: note = chemically synthesized
  source 1..22: mol_type = other DNA
ccccacctctaccctgtctcac

SEQ ID NO: 62401 - DNA, 22 bp, synthetic construct
  misc_feature 1..22: note = chemically synthesized
  source 1..22: mol_type = other DNA
cccacctctaccctgtctcacg

SEQ ID NO: 62402 - DNA, 22 bp, synthetic construct
  misc_feature 1..22: note = chemically synthesized
  source 1..22: mol_type = other DNA
taccctgtctcacggcccccca

SEQ ID NO: 62403 - DNA, 22 bp, synthetic construct
  misc_feature 1..22: note = chemically synthesized
  source 1..22: mol_type = other DNA
ccctgtctcacggccccccatg

SEQ ID NO: 62404 - DNA, 22 bp, synthetic construct
  misc_feature 1..22: note = chemically synthesized
  source 1..22: mol_type = other DNA
tctcacggccccccatgccagc

SEQ ID NO: 62405 - DNA, 22 bp, synthetic construct
  misc_feature 1..22: note = chemically synthesized
  source 1..22: mol_type = other DNA
acggccccccatgccagcctga

SEQ ID NO: 62406 - DNA, 22 bp, synthetic construct
  misc_feature 1..22: note = chemically synthesized
  source 1..22: mol_type = other DNA
acggttgtgtctgcctcagtca

SEQ ID NO: 62407 - DNA, 22 bp, synthetic construct
  misc_feature 1..22: note = chemically synthesized
  source 1..22: mol_type = other DNA
tgtctgcctcagtcatgctcca

SEQ ID NO: 62408 - DNA, 22 bp, synthetic construct
  misc_feature 1..22: note = chemically synthesized
  source 1..22: mol_type = other DNA
cctcagtcatgctccatttttc

SEQ ID NO: 62409 - DNA, 22 bp, synthetic construct
  misc_feature 1..22: note = chemically synthesized
  source 1..22: mol_type = other DNA
agtcatgctccatttttccatc

SEQ ID NO: 62410 - DNA, 22 bp, synthetic construct
  misc_feature 1..22: note = chemically synthesized
  source 1..22: mol_type = other DNA
catttttccatcgggaccatca

SEQ ID NO: 62411 - DNA, 22 bp, synthetic construct
  misc_feature 1..22: note = chemically synthesized
  source 1..22: mol_type = other DNA
ttccatcgggaccatcaagagg

SEQ ID NO: 62412 - DNA, 22 bp, synthetic construct
  misc_feature 1..22: note = chemically synthesized
  source 1..22: mol_type = other DNA
tccatcgggaccatcaagaggg

SEQ ID NO: 62413 - DNA, 22 bp, synthetic construct
  misc_feature 1..22: note = chemically synthesized
  source 1..22: mol_type = other DNA
ccatcgggaccatcaagagggt

SEQ ID NO: 62414 - DNA, 22 bp, synthetic construct
  misc_feature 1..22: note = chemically synthesized
  source 1..22: mol_type = other DNA
catcgggaccatcaagagggtg

SEQ ID NO: 62415 - DNA, 22 bp, synthetic construct
  misc_feature 1..22: note = chemically synthesized
  source 1..22: mol_type = other DNA
gtgtctaaggctgactgggtaa

SEQ ID NO: 62416 - DNA, 22 bp, synthetic construct
  misc_feature 1..22: note = chemically synthesized
  source 1..22: mol_type = other DNA
tgtctaaggctgactgggtaac

SEQ ID NO: 62417 - DNA, 22 bp, synthetic construct
  misc_feature 1..22: note = chemically synthesized
  source 1..22: mol_type = other DNA
aggctgactgggtaactttgga

SEQ ID NO: 62418 - DNA, 22 bp, synthetic construct
  misc_feature 1..22: note = chemically synthesized
  source 1..22: mol_type = other DNA
actgggtaactttggatgagcg

SEQ ID NO: 62419 - DNA, 22 bp, synthetic construct
  misc_feature 1..22: note = chemically synthesized
  source 1..22: mol_type = other DNA
ggtaactttggatgagcggtct

SEQ ID NO: 62420 - DNA, 22 bp, synthetic construct
  misc_feature 1..22: note = chemically synthesized
  source 1..22: mol_type = other DNA
tggatgagcggtctctccgctc

SEQ ID NO: 62421 - DNA, 22 bp, synthetic construct
  misc_feature 1..22: note = chemically synthesized
  source 1..22: mol_type = other DNA
ggatgagcggtctctccgctct

SEQ ID NO: 62422 - DNA, 22 bp, synthetic construct
  misc_feature 1..22: note = chemically synthesized
  source 1..22: mol_type = other DNA
gatgagcggtctctccgctctg

SEQ ID NO: 62423 - DNA, 22 bp, synthetic construct
  misc_feature 1..22: note = chemically synthesized
  source 1..22: mol_type = other DNA
tccgctctgagcctgtttcctc

SEQ ID NO: 62424 - DNA, 22 bp, synthetic construct
  misc_feature 1..22: note = chemically synthesized
  source 1..22: mol_type = other DNA
cgctctgagcctgtttcctcat

SEQ ID NO: 62425 - DNA, 22 bp, synthetic construct
  misc_feature 1..22: note = chemically synthesized
  source 1..22: mol_type = other DNA
tgagcctgtttcctcatctgtc

SEQ ID NO: 62426 - DNA, 22 bp, synthetic construct
  misc_feature 1..22: note = chemically synthesized
  source 1..22: mol_type = other DNA
agcctgtttcctcatctgtcaa

SEQ ID NO: 62427 - DNA, 22 bp, synthetic construct
  misc_feature 1..22: note = chemically synthesized
  source 1..22: mol_type = other DNA
tttcctcatctgtcaaatgggc

SEQ ID NO: 62428 - DNA, 22 bp, synthetic construct
  misc_feature 1..22: note = chemically synthesized
  source 1..22: mol_type = other DNA
cctcatctgtcaaatgggctct

SEQ ID NO: 62429 - DNA, 22 bp, synthetic construct
  misc_feature 1..22: note = chemically synthesized
  source 1..22: mol_type = other DNA
ctcatctgtcaaatgggctcta

SEQ ID NO: 62430 - DNA, 22 bp, synthetic construct
  misc_feature 1..22: note = chemically synthesized
  source 1..22: mol_type = other DNA
atctgtcaaatgggctctaacc

SEQ ID NO: 62431 - DNA, 22 bp, synthetic construct
  misc_feature 1..22: note = chemically synthesized
  source 1..22: mol_type = other DNA
tcaaatgggctctaacccactc

SEQ ID NO: 62432 - DNA, 22 bp, synthetic construct
  misc_feature 1..22: note = chemically synthesized
  source 1..22: mol_type = other DNA
taacccactctgatctcccagg

SEQ ID NO: 62433 - DNA, 22 bp, synthetic construct
  misc_feature 1..22: note = chemically synthesized
  source 1..22: mol_type = other DNA
acccactctgatctcccagggc

SEQ ID NO: 62434 - DNA, 22 bp, synthetic construct
  misc_feature 1..22: note = chemically synthesized
  source 1..22: mol_type = other DNA
tgatctcccagggcggcagtaa

SEQ ID NO: 62435 - DNA, 22 bp, synthetic construct
  misc_feature 1..22: note = chemically synthesized
  source 1..22: mol_type = other DNA
atctcccagggcggcagtaagt

SEQ ID NO: 62436 - DNA, 22 bp, synthetic construct
  misc_feature 1..22: note = chemically synthesized
  source 1..22: mol_type = other DNA
ccagggcggcagtaagtcttca

SEQ ID NO: 62437 - DNA, 22 bp, synthetic construct
  misc_feature 1..22: note = chemically synthesized
  source 1..22: mol_type = other DNA
cagcatcaggcattttggggtg

SEQ ID NO: 62438 - DNA, 22 bp, synthetic construct
  misc_feature 1..22: note = chemically synthesized
  source 1..22: mol_type = other DNA
agcatcaggcattttggggtga

SEQ ID NO: 62439 - DNA, 22 bp, synthetic construct
  misc_feature 1..22: note = chemically synthesized
  source 1..22: mol_type = other DNA
tggggtgactcagtaaatggta

SEQ ID NO: 62440 - DNA, 22 bp, synthetic construct
  misc_feature 1..22: note = chemically synthesized
  source 1..22: mol_type = other DNA
ggggtgactcagtaaatggtag

SEQ ID NO: 62441 - DNA, 22 bp, synthetic construct
  misc_feature 1..22: note = chemically synthesized
  source 1..22: mol_type = other DNA
gggtgactcagtaaatggtaga

SEQ ID NO: 62442 - DNA, 22 bp, synthetic construct
  misc_feature 1..22: note = chemically synthesized
  source 1..22: mol_type = other DNA
agtaaatggtagatcttgctac

SEQ ID NO: 62443 - DNA, 22 bp, synthetic construct
  misc_feature 1..22: note = chemically synthesized
  source 1..22: mol_type = other DNA
gctaccagtggaacagccacta

SEQ ID NO: 62444 - DNA, 22 bp, synthetic construct
  misc_feature 1..22: note = chemically synthesized
  source 1..22: mol_type = other DNA
ctaccagtggaacagccactaa

SEQ ID NO: 62445 - DNA, 22 bp, synthetic construct
  misc_feature 1..22: note = chemically synthesized
  source 1..22: mol_type = other DNA
ccagtggaacagccactaagga

SEQ ID NO: 62446 - DNA, 22 bp, synthetic construct
  misc_feature 1..22: note = chemically synthesized
  source 1..22: mol_type = other DNA
aggattctgcagtgagagcaga

SEQ ID NO: 62447 - DNA, 22 bp, synthetic construct
  misc_feature 1..22: note = chemically synthesized
  source 1..22: mol_type = other DNA
tgcagtgagagcagagggccag

SEQ ID NO: 62448 - DNA, 22 bp, synthetic construct
  misc_feature 1..22: note = chemically synthesized
  source 1..22: mol_type = other DNA
cagtgagagcagagggccagct

SEQ ID NO: 62449 - DNA, 22 bp, synthetic construct
  misc_feature 1..22: note = chemically synthesized
  source 1..22: mol_type = other DNA
agtggtactctcccagagactg

SEQ ID NO: 62450 - DNA, 22 bp, synthetic construct
  misc_feature 1..22: note = chemically synthesized
  source 1..22: mol_type = other DNA
tcccagagactgtctgactcac

SEQ ID NO: 62451 - DNA, 22 bp, synthetic construct
  misc_feature 1..22: note = chemically synthesized
  source 1..22: mol_type = other DNA
ccagagactgtctgactcacgc

SEQ ID NO: 62452 - DNA, 22 bp, synthetic construct
  misc_feature 1..22: note = chemically synthesized
  source 1..22: mol_type = other DNA
tctgactcacgccaccccctcc

SEQ ID NO: 62453 - DNA, 22 bp, synthetic construct
  misc_feature 1..22: note = chemically synthesized
  source 1..22: mol_type = other DNA
actcacgccaccccctccacct

SEQ ID NO: 62454 - DNA, 22 bp, synthetic construct
  misc_feature 1..22: note = chemically synthesized
  source 1..22: mol_type = other DNA
acgccaccccctccaccttgga

SEQ ID NO: 62455 - DNA, 22 bp, synthetic construct
  misc_feature 1..22: note = chemically synthesized
  source 1..22: mol_type = other DNA
caccttggacacaggacgctgt

SEQ ID NO: 62456 - DNA, 22 bp, synthetic construct
  misc_feature 1..22: note = chemically synthesized
  source 1..22: mol_type = other DNA
ggacacaggacgctgtggtttc

SEQ ID NO: 62457 - DNA, 22 bp, synthetic construct
  misc_feature 1..22: note = chemically synthesized
  source 1..22: mol_type = other DNA
gacacaggacgctgtggtttct

SEQ ID NO: 62458 - DNA, 22 bp, synthetic construct
  misc_feature 1..22: note = chemically synthesized
  source 1..22: mol_type = other DNA
tggtttctgagccaggtacaat

SEQ ID NO: 62459 - DNA, 22 bp, synthetic construct
  misc_feature 1..22: note = chemically synthesized
  source 1..22: mol_type = other DNA
ctgagccaggtacaatgactcc

SEQ ID NO: 62460 - DNA, 22 bp, synthetic construct
  misc_feature 1..22: note = chemically synthesized
  source 1..22: mol_type = other DNA
tgagccaggtacaatgactcct

SEQ ID NO: 62461 - DNA, 22 bp, synthetic construct
  misc_feature 1..22: note = chemically synthesized
  source 1..22: mol_type = other DNA
agccaggtacaatgactccttt

SEQ ID NO: 62462 - DNA, 22 bp, synthetic construct
  misc_feature 1..22: note = chemically synthesized
  source 1..22: mol_type = other DNA
ctttcggtaagtgcagtggaag

SEQ ID NO: 62463 - DNA, 22 bp, synthetic construct
  misc_feature 1..22: note = chemically synthesized
  source 1..22: mol_type = other DNA
tcggtaagtgcagtggaagctg

SEQ ID NO: 62464 - DNA, 22 bp, synthetic construct
  misc_feature 1..22: note = chemically synthesized
  source 1..22: mol_type = other DNA
cggtaagtgcagtggaagctgt

SEQ ID NO: 62465 - DNA, 22 bp, synthetic construct
  misc_feature 1..22: note = chemically synthesized
  source 1..22: mol_type = other DNA
ggtaagtgcagtggaagctgta

SEQ ID NO: 62466 - DNA, 22 bp, synthetic construct
  misc_feature 1..22: note = chemically synthesized
  source 1..22: mol_type = other DNA
tacactgcccaggcaaagcgtc

SEQ ID NO: 62467 - DNA, 22 bp, synthetic construct
  misc_feature 1..22: note = chemically synthesized
  source 1..22: mol_type = other DNA
cccaggcaaagcgtccgggcag

SEQ ID NO: 62468 - DNA, 22 bp, synthetic construct
  misc_feature 1..22: note = chemically synthesized
  source 1..22: mol_type = other DNA
agatcccagccagtggacttag

SEQ ID NO: 62469 - DNA, 22 bp, synthetic construct
  misc_feature 1..22: note = chemically synthesized
  source 1..22: mol_type = other DNA
agcccctgtttgctcctccgat

SEQ ID NO: 62470 - DNA, 22 bp, synthetic construct
  misc_feature 1..22: note = chemically synthesized
  source 1..22: mol_type = other DNA
gcccctgtttgctcctccgata

SEQ ID NO: 62471 - DNA, 22 bp, synthetic construct
  misc_feature 1..22: note = chemically synthesized
  source 1..22: mol_type = other DNA
tttgctcctccgataactgggg

SEQ ID NO: 62472 - DNA, 22 bp, synthetic construct
  misc_feature 1..22: note = chemically synthesized
  source 1..22: mol_type = other DNA
gctcctccgataactggggtga

SEQ ID NO: 62473 - DNA, 22 bp, synthetic construct
  misc_feature 1..22: note = chemically synthesized
  source 1..22: mol_type = other DNA
ctcctccgataactggggtgac

SEQ ID NO: 62474 - DNA, 22 bp, synthetic construct
  misc_feature 1..22: note = chemically synthesized
  source 1..22: mol_type = other DNA
ctccgataactggggtgacctt

SEQ ID NO: 62475 - DNA, 22 bp, synthetic construct
  misc_feature 1..22: note = chemically synthesized
  source 1..22: mol_type = other DNA
cgataactggggtgaccttggt

SEQ ID NO: 62476 - DNA, 22 bp, synthetic construct
  misc_feature 1..22: note = chemically synthesized
  source 1..22: mol_type = other DNA
gggtgaccttggttaatattca

SEQ ID NO: 62477 - DNA, 22 bp, synthetic construct
  misc_feature 1..22: note = chemically synthesized
  source 1..22: mol_type = other DNA
ggttaatattcaccagcagcct

SEQ ID NO: 62478 - DNA, 22 bp, synthetic construct
  misc_feature 1..22: note = chemically synthesized
  source 1..22: mol_type = other DNA
gttaatattcaccagcagcctc

SEQ ID NO: 62479 - DNA, 22 bp, synthetic construct
  misc_feature 1..22: note = chemically synthesized
  source 1..22: mol_type = other DNA
atattcaccagcagcctccccc

SEQ ID NO: 62480 - DNA, 22 bp, synthetic construct
  misc_feature 1..22: note = chemically synthesized
  source 1..22: mol_type = other DNA
accagcagcctcccccgttgcc

SEQ ID NO: 62481 - DNA, 22 bp, synthetic construct
  misc_feature 1..22: note = chemically synthesized
  source 1..22: mol_type = other DNA
ccccgttgcccctctggatcca

SEQ ID NO: 62482 - DNA, 22 bp, synthetic construct
  misc_feature 1..22: note = chemically synthesized
  source 1..22: mol_type = other DNA
cccctctggatccactgcttaa

SEQ ID NO: 62483 - DNA, 22 bp, synthetic construct
  misc_feature 1..22: note = chemically synthesized
  source 1..22: mol_type = other DNA
tggatccactgcttaaatacgg

SEQ ID NO: 62484 - DNA, 22 bp, synthetic construct
  misc_feature 1..22: note = chemically synthesized
  source 1..22: mol_type = other DNA
gatccactgcttaaatacggac

SEQ ID NO: 62485 - DNA, 22 bp, synthetic construct
  misc_feature 1..22: note = chemically synthesized
  source 1..22: mol_type = other DNA
cttaaatacggacgaggacagg

SEQ ID NO: 62486 - DNA, 22 bp, synthetic construct
  misc_feature 1..22: note = chemically synthesized
  source 1..22: mol_type = other DNA
aaatacggacgaggacagggcc

SEQ ID NO: 62487 - DNA, 22 bp, synthetic construct
  misc_feature 1..22: note = chemically synthesized
  source 1..22: mol_type = other DNA
aatacggacgaggacagggccc

SEQ ID NO: 62488 - DNA, 22 bp, synthetic construct
  misc_feature 1..22: note = chemically synthesized
  source 1..22: mol_type = other DNA
tctcctcagcttcaggcaccac

SEQ ID NO: 62489 - DNA, 22 bp, synthetic construct
  misc_feature 1..22: note = chemically synthesized
  source 1..22: mol_type = other DNA
ctcagcttcaggcaccaccact

SEQ ID NO: 62490 - DNA, 22 bp, synthetic construct
  misc_feature 1..22: note = chemically synthesized
  source 1..22: mol_type = other DNA
agcttcaggcaccaccactgac

SEQ ID NO: 62491 - DNA, 22 bp, synthetic construct
  misc_feature 1..22: note = chemically synthesized
  source 1..22: mol_type = other DNA
caggcaccaccactgacctggg

SEQ ID NO: 62492 - DNA, 22 bp, synthetic construct
  misc_feature 1..22: note = chemically synthesized
  source 1..22: mol_type = other DNA
aggcaccaccactgacctggga

SEQ ID NO: 62493 - DNA, 22 bp, synthetic construct
  misc_feature 1..22: note = chemically synthesized
  source 1..22: mol_type = other DNA
acctgggacagtgaatcgtaag

SEQ ID NO: 62494 - DNA, 22 bp, synthetic construct
  misc_feature 1..22: note = chemically synthesized
  source 1..22: mol_type = other DNA
ggacagtgaatcgtaagtatgc

SEQ ID NO: 62495 - DNA, 22 bp, synthetic construct
  misc_feature 1..22: note = chemically synthesized
  source 1..22: mol_type = other DNA
tcactgcgagaggttctggaga

SEQ ID NO: 62496 - DNA, 22 bp, synthetic construct
  misc_feature 1..22: note = chemically synthesized
  source 1..22: mol_type = other DNA
cactgcgagaggttctggagag

SEQ ID NO: 62497 - DNA, 22 bp, synthetic construct
  misc_feature 1..22: note = chemically synthesized
  source 1..22: mol_type = other DNA
actgcgagaggttctggagagg

SEQ ID NO: 62498 - DNA, 22 bp, synthetic construct
  misc_feature 1..22: note = chemically synthesized
  source 1..22: mol_type = other DNA
cgagaggttctggagaggcttc

SEQ ID NO: 62499 - DNA, 22 bp, synthetic construct
  misc_feature 1..22: note = chemically synthesized
  source 1..22: mol_type = other DNA
tggagaggcttctgagctcccc

SEQ ID NO: 62500 - DNA, 22 bp, synthetic construct
  misc_feature 1..22: note = chemically synthesized
  source 1..22: mol_type = other DNA
gagaggcttctgagctccccat

SEQ ID NO: 62501 - DNA, 22 bp, synthetic construct
  misc_feature 1..22: note = chemically synthesized
  source 1..22: mol_type = other DNA
ctgagctccccatggcccaggc

SEQ ID NO: 62502 - DNA, 22 bp, synthetic construct
  misc_feature 1..22: note = chemically synthesized
  source 1..22: mol_type = other DNA
tgagctccccatggcccaggca

SEQ ID NO: 62503 - DNA, 22 bp, synthetic construct
  misc_feature 1..22: note = chemically synthesized
  source 1..22: mol_type = other DNA
agctccccatggcccaggcagg

SEQ ID NO: 62504 - DNA, 22 bp, synthetic construct
  misc_feature 1..22: note = chemically synthesized
  source 1..22: mol_type = other DNA
cccatggcccaggcaggcagca

SEQ ID NO: 62505 - DNA, 22 bp, synthetic construct
  misc_feature 1..22: note = chemically synthesized
  source 1..22: mol_type = other DNA
gggcaggaggggggttgtggag

SEQ ID NO: 62506 - DNA, 22 bp, synthetic construct
  misc_feature 1..22: note = chemically synthesized
  source 1..22: mol_type = other DNA
tggagtgggtatccgcctgctg

SEQ ID NO: 62507 - DNA, 22 bp, synthetic construct
  misc_feature 1..22: note = chemically synthesized
  source 1..22: mol_type = other DNA
ctgaggtgcagggcagatggag

SEQ ID NO: 62508 - DNA, 22 bp, synthetic construct
  misc_feature 1..22: note = chemically synthesized
  source 1..22: mol_type = other DNA
aggtgcagggcagatggagagg

SEQ ID NO: 62509 - DNA, 22 bp, synthetic construct
  misc_feature 1..22: note = chemically synthesized
  source 1..22: mol_type = other DNA
cagctgagctcctattttcata

SEQ ID NO: 62510 - DNA, 22 bp, synthetic construct
  misc_feature 1..22: note = chemically synthesized
  source 1..22: mol_type = other DNA
agctcctattttcataataaca

SEQ ID NO: 62511 - DNA, 22 bp, synthetic construct
  misc_feature 1..22: note = chemically synthesized
  source 1..22: mol_type = other DNA
ctattttcataataacagcagc

SEQ ID NO: 62512 - DNA, 22 bp, synthetic construct
  misc_feature 1..22: note = chemically synthesized
  source 1..22: mol_type = other DNA
ttttcataataacagcagccat

SEQ ID NO: 62513 - DNA, 22 bp, synthetic construct
  misc_feature 1..22: note = chemically synthesized
  source 1..22: mol_type = other DNA
tcataataacagcagccatgag

SEQ ID NO: 62514 - DNA, 22 bp, synthetic construct
  misc_feature 1..22: note = chemically synthesized
  source 1..22: mol_type = other DNA
cataataacagcagccatgagg

SEQ ID NO: 62515 - DNA, 22 bp, synthetic construct
  misc_feature 1..22: note = chemically synthesized
  source 1..22: mol_type = other DNA
ataataacagcagccatgaggg

SEQ ID NO: 62516 - DNA, 22 bp, synthetic construct
  misc_feature 1..22: note = chemically synthesized
  source 1..22: mol_type = other DNA
tgtcctgtttcccagtcctgcc

SEQ ID NO: 62517 - DNA, 22 bp, synthetic construct
  misc_feature 1..22: note = chemically synthesized
  source 1..22: mol_type = other DNA
tttcccagtcctgcccggtccc

SEQ ID NO: 62518 - DNA, 22 bp, synthetic construct
  misc_feature 1..22: note = chemically synthesized
  source 1..22: mol_type = other DNA
cccagtcctgcccggtcccccc

SEQ ID NO: 62519 - DNA, 22 bp, synthetic construct
  misc_feature 1..22: note = chemically synthesized
  source 1..22: mol_type = other DNA
ccagtcctgcccggtcccccct

SEQ ID NO: 62520 - DNA, 22 bp, synthetic construct
  misc_feature 1..22: note = chemically synthesized
  source 1..22: mol_type = other DNA
cccggtcccccctcggtacctc

SEQ ID NO: 62521 - DNA, 22 bp, synthetic construct
  misc_feature 1..22: note = chemically synthesized
  source 1..22: mol_type = other DNA
ggtacctcctggtggatacact

SEQ ID NO: 62522 - DNA, 22 bp, synthetic construct
  misc_feature 1..22: note = chemically synthesized
  source 1..22: mol_type = other DNA
ctggtggatacactggttcctg

SEQ ID NO: 62523 - DNA, 22 bp, synthetic construct
  misc_feature 1..22: note = chemically synthesized
  source 1..22: mol_type = other DNA
gtggatacactggttcctgtaa

SEQ ID NO: 62524 - DNA, 22 bp, synthetic construct
  misc_feature 1..22: note = chemically synthesized
  source 1..22: mol_type = other DNA
gttcctgtaagcagaagtggat

SEQ ID NO: 62525 - DNA, 22 bp, synthetic construct
  misc_feature 1..22: note = chemically synthesized
  source 1..22: mol_type = other DNA
ctgtaagcagaagtggatgagg

SEQ ID NO: 62526 - DNA, 22 bp, synthetic construct
  misc_feature 1..22: note = chemically synthesized
  source 1..22: mol_type = other DNA
taagcagaagtggatgagggtg

SEQ ID NO: 62527 - DNA, 22 bp, synthetic construct
  misc_feature 1..22: note = chemically synthesized
  source 1..22: mol_type = other DNA
ggtctgcagtcctggcacccca

SEQ ID NO: 62528 - DNA, 22 bp, synthetic construct
  misc_feature 1..22: note = chemically synthesized
  source 1..22: mol_type = other DNA
cagtcctggcaccccaggatgg

SEQ ID NO: 62529 - DNA, 22 bp, synthetic construct
  misc_feature 1..22: note = chemically synthesized
  source 1..22: mol_type = other DNA
gcaccccaggatgggggacacc

SEQ ID NO: 62530 - DNA, 22 bp, synthetic construct
  misc_feature 1..22: note = chemically synthesized
  source 1..22: mol_type = other DNA
ctttctgtttgcacagctcctc

SEQ ID NO: 62531 - DNA, 22 bp, synthetic construct
  misc_feature 1..22: note = chemically synthesized
  source 1..22: mol_type = other DNA
tttctgtttgcacagctcctct

SEQ ID NO: 62532 - DNA, 22 bp, synthetic construct
  misc_feature 1..22: note = chemically synthesized
  source 1..22: mol_type = other DNA
tctgtttgcacagctcctctgt

SEQ ID NO: 62533 - DNA, 22 bp, synthetic construct
  misc_feature 1..22: note = chemically synthesized
  source 1..22: mol_type = other DNA
ctgtttgcacagctcctctgtc

SEQ ID NO: 62534 - DNA, 22 bp, synthetic construct
  misc_feature 1..22: note = chemically synthesized
  source 1..22: mol_type = other DNA
tgtttgcacagctcctctgtct

SEQ ID NO: 62535 - DNA, 22 bp, synthetic construct
  misc_feature 1..22: note = chemically synthesized
  source 1..22: mol_type = other DNA
tttgcacagctcctctgtctgt

SEQ ID NO: 62536 - DNA, 22 bp, synthetic construct
  misc_feature 1..22: note = chemically synthesized
  source 1..22: mol_type = other DNA
gcacagctcctctgtctgtcgg

SEQ ID NO: 62537 - DNA, 22 bp, synthetic construct
  misc_feature 1..22: note = chemically synthesized
  source 1..22: mol_type = other DNA
cacagctcctctgtctgtcggg

SEQ ID NO: 62538 - DNA, 22 bp, synthetic construct
  misc_feature 1..22: note = chemically synthesized
  source 1..22: mol_type = other DNA
ctctgtctgtcgggggctcctg

SEQ ID NO: 62539 - DNA, 22 bp, synthetic construct
  misc_feature 1..22: note = chemically synthesized
  source 1..22: mol_type = other DNA
tgtctgtcgggggctcctgtct

SEQ ID NO: 62540 - DNA, 22 bp, synthetic construct
  misc_feature 1..22: note = chemically synthesized
  source 1..22: mol_type = other DNA
tctgtcgggggctcctgtctgt

SEQ ID NO: 62541 - DNA, 22 bp, synthetic construct
  misc_feature 1..22: note = chemically synthesized
  source 1..22: mol_type = other DNA
tcgggggctcctgtctgttgtc

SEQ ID NO: 62542 - DNA, 22 bp, synthetic construct
  misc_feature 1..22: note = chemically synthesized
  source 1..22: mol_type = other DNA
ctgtctgttgtctcctataagc

SEQ ID NO: 62543 - DNA, 22 bp, synthetic construct
  misc_feature 1..22: note = chemically synthesized
  source 1..22: mol_type = other DNA
tctgttgtctcctataagcctc

SEQ ID NO: 62544 - DNA, 22 bp, synthetic construct
  misc_feature 1..22: note = chemically synthesized
  source 1..22: mol_type = other DNA
ttgtctcctataagcctcacca

SEQ ID NO: 62545 - DNA, 22 bp, synthetic construct
  misc_feature 1..22: note = chemically synthesized
  source 1..22: mol_type = other DNA
tctcctataagcctcaccacct

SEQ ID NO: 62546 - DNA, 22 bp, synthetic construct
  misc_feature 1..22: note = chemically synthesized
  source 1..22: mol_type = other DNA
ctataagcctcaccacctctcc

SEQ ID NO: 62547 - DNA, 22 bp, synthetic construct
  misc_feature 1..22: note = chemically synthesized
  source 1..22: mol_type = other DNA
taagcctcaccacctctcctac

SEQ ID NO: 62548 - DNA, 22 bp, synthetic construct
  misc_feature 1..22: note = chemically synthesized
  source 1..22: mol_type = other DNA
accacctctcctactgcttggg

SEQ ID NO: 62549 - DNA, 22 bp, synthetic construct
  misc_feature 1..22: note = chemically synthesized
  source 1..22: mol_type = other DNA
tcctactgcttgggcatgcatc

SEQ ID NO: 62550 - DNA, 22 bp, synthetic construct
  misc_feature 1..22: note = chemically synthesized
  source 1..22: mol_type = other DNA
ctactgcttgggcatgcatctt

SEQ ID NO: 62551 - DNA, 22 bp, synthetic construct
  misc_feature 1..22: note = chemically synthesized
  source 1..22: mol_type = other DNA
ctgcttgggcatgcatctttct

SEQ ID NO: 62552 - DNA, 22 bp, synthetic construct
  misc_feature 1..22: note = chemically synthesized
  source 1..22: mol_type = other DNA
cttgggcatgcatctttctccc

SEQ ID NO: 62553 - DNA, 22 bp, synthetic construct
  misc_feature 1..22: note = chemically synthesized
  source 1..22: mol_type = other DNA
gggcatgcatctttctcccctt

SEQ ID NO: 62554 - DNA, 22 bp, synthetic construct
  misc_feature 1..22: note = chemically synthesized
  source 1..22: mol_type = other DNA
ggcatgcatctttctccccttc

SEQ ID NO: 62555 - DNA, 22 bp, synthetic construct
  misc_feature 1..22: note = chemically synthesized
  source 1..22: mol_type = other DNA
tctccccttctatagatgagga

SEQ ID NO: 62556 - DNA, 22 bp, synthetic construct
  misc_feature 1..22: note = chemically synthesized
  source 1..22: mol_type = other DNA
ctccccttctatagatgaggag

SEQ ID NO: 62557 - DNA, 22 bp, synthetic construct
  misc_feature 1..22: note = chemically synthesized
  source 1..22: mol_type = other DNA
tccccttctatagatgaggagg

SEQ ID NO: 62558 - DNA, 22 bp, synthetic construct
  misc_feature 1..22: note = chemically synthesized
  source 1..22: mol_type = other DNA
cccttctatagatgaggaggtt

SEQ ID NO: 62559 - DNA, 22 bp, synthetic construct
  misc_feature 1..22: note = chemically synthesized
  source 1..22: mol_type = other DNA
ctatagatgaggaggttaaggt

SEQ ID NO: 62560 - DNA, 22 bp, synthetic construct
  misc_feature 1..22: note = chemically synthesized
  source 1..22: mol_type = other DNA
tatagatgaggaggttaaggtc

SEQ ID NO: 62561 - DNA, 22 bp, synthetic construct
  misc_feature 1..22: note = chemically synthesized
  source 1..22: mol_type = other DNA
tagatgaggaggttaaggtcca

SEQ ID NO: 62562 - DNA, 22 bp, synthetic construct
  misc_feature 1..22: note = chemically synthesized
  source 1..22: mol_type = other DNA
aggtccagagaggggtggggag

SEQ ID NO: 62563 - DNA, 22 bp, synthetic construct
  misc_feature 1..22: note = chemically synthesized
  source 1..22: mol_type = other DNA
acattctccatcccctccagat

SEQ ID NO: 62564 - DNA, 22 bp, synthetic construct
  misc_feature 1..22: note = chemically synthesized
  source 1..22: mol_type = other DNA
tccatcccctccagatatgacc

SEQ ID NO: 62565 - DNA, 22 bp, synthetic construct
  misc_feature 1..22: note = chemically synthesized
  source 1..22: mol_type = other DNA
catcccctccagatatgaccag

SEQ ID NO: 62566 - DNA, 22 bp, synthetic construct
  misc_feature 1..22: note = chemically synthesized
  source 1..22: mol_type = other DNA
cagatatgaccaggaacagacc

SEQ ID NO: 62567 - DNA, 20 bp, synthetic construct
  misc_feature 1..20: note = chemically synthesized
  source 1..20: mol_type = other DNA
cgagcgagccgcgatgacaa

SEQ ID NO: 62568 - DNA, 20 bp, synthetic construct
  misc_feature 1..20: note = chemically synthesized
  source 1..20: mol_type = other DNA
tcccatcaacatttctgtgc

SEQ ID NO: 62569 - DNA, 20 bp, synthetic construct
  misc_feature 1..20: note = chemically synthesized
  source 1..20: mol_type = other DNA
tgctggactccttccactcg

SEQ ID NO: 62570 - DNA, 20 bp, synthetic construct
  misc_feature 1..20: note = chemically synthesized
  source 1..20: mol_type = other DNA
gctggactccttccactcgc

SEQ ID NO: 62571 - DNA, 20 bp, synthetic construct
  misc_feature 1..20: note = chemically synthesized
  source 1..20: mol_type = other DNA
ttccactcgcgggtcgtctc

SEQ ID NO: 62572 - DNA, 20 bp, synthetic construct
  misc_feature 1..20: note = chemically synthesized
  source 1..20: mol_type = other DNA
ccactcgcgggtcgtctcca

SEQ ID NO: 62573 - DNA, 20 bp, synthetic construct
  misc_feature 1..20: note = chemically synthesized
  source 1..20: mol_type = other DNA
cgcgggtcgtctccagagct

SEQ ID NO: 62574 - DNA, 20 bp, synthetic construct
  misc_feature 1..20: note = chemically synthesized
  source 1..20: mol_type = other DNA
gtctccagagctcagaaaat

SEQ ID NO: 62575 - DNA, 20 bp, synthetic construct
  misc_feature 1..20: note = chemically synthesized
  source 1..20: mol_type = other DNA
tctccagagctcagaaaatg

SEQ ID NO: 62576 - DNA, 20 bp, synthetic construct
  misc_feature 1..20: note = chemically synthesized
  source 1..20: mol_type = other DNA
agctcagaaaatgaggtgat

SEQ ID NO: 62577 - DNA, 20 bp, synthetic construct
  misc_feature 1..20: note = chemically synthesized
  source 1..20: mol_type = other DNA
tcagaaaatgaggtgatcag

SEQ ID NO: 62578 - DNA, 20 bp, synthetic construct
  misc_feature 1..20: note = chemically synthesized
  source 1..20: mol_type = other DNA
cagaaaatgaggtgatcagt

SEQ ID NO: 62579 - DNA, 20 bp, synthetic construct
  misc_feature 1..20: note = chemically synthesized
  source 1..20: mol_type = other DNA
aatgaggtgatcagtgggac

SEQ ID NO: 62580 - DNA, 20 bp, synthetic construct
  misc_feature 1..20: note = chemically synthesized
  source 1..20: mol_type = other DNA
aggtgatcagtgggacgagt

SEQ ID NO: 62581 - DNA, 20 bp, synthetic construct
  misc_feature 1..20: note = chemically synthesized
  source 1..20: mol_type = other DNA
ggtgatcagtgggacgagta

SEQ ID NO: 62582 - DNA, 20 bp, synthetic construct
  misc_feature 1..20: note = chemically synthesized
  source 1..20: mol_type = other DNA
gatcagtgggacgagtaagg

SEQ ID NO: 62583 - DNA, 20 bp, synthetic construct
  misc_feature 1..20: note = chemically synthesized
  source 1..20: mol_type = other DNA
atcagtgggacgagtaagga

SEQ ID NO: 62584 - DNA, 20 bp, synthetic construct
  misc_feature 1..20: note = chemically synthesized
  source 1..20: mol_type = other DNA
tcagtgggacgagtaaggaa

SEQ ID NO: 62585 - DNA, 20 bp, synthetic construct
  misc_feature 1..20: note = chemically synthesized
  source 1..20: mol_type = other DNA
cagtgggacgagtaaggaag

SEQ ID NO: 62586 - DNA, 20 bp, synthetic construct
  misc_feature 1..20: note = chemically synthesized
  source 1..20: mol_type = other DNA
agtgggacgagtaaggaagg

SEQ ID NO: 62587 - DNA, 20 bp, synthetic construct
  misc_feature 1..20: note = chemically synthesized
  source 1..20: mol_type = other DNA
gtgggacgagtaaggaaggg

SEQ ID NO: 62588 - DNA, 20 bp, synthetic construct
  misc_feature 1..20: note = chemically synthesized
  source 1..20: mol_type = other DNA
gacgagtaaggaaggggggt

SEQ ID NO: 62589 - DNA, 20 bp, synthetic construct
  misc_feature 1..20: note = chemically synthesized
  source 1..20: mol_type = other DNA
acgagtaaggaaggggggtt

SEQ ID NO: 62590 - DNA, 20 bp, synthetic construct
  misc_feature 1..20: note = chemically synthesized
  source 1..20: mol_type = other DNA
gagtaaggaaggggggttgg

SEQ ID NO: 62591 - DNA, 20 bp, synthetic construct
  misc_feature 1..20: note = chemically synthesized
  source 1..20: mol_type = other DNA
gtaaggaaggggggttggga

SEQ ID NO: 62592 - DNA, 20 bp, synthetic construct
  misc_feature 1..20: note = chemically synthesized
  source 1..20: mol_type = other DNA
taaggaaggggggttgggag

SEQ ID NO: 62593 - DNA, 20 bp, synthetic construct
  misc_feature 1..20: note = chemically synthesized
  source 1..20: mol_type = other DNA
aaggaaggggggttgggaga

SEQ ID NO: 62594 - DNA, 20 bp, synthetic construct
  misc_feature 1..20: note = chemically synthesized
  source 1..20: mol_type = other DNA
aggaaggggggttgggagag

SEQ ID NO: 62595 - DNA, 20 bp, synthetic construct
  misc_feature 1..20: note = chemically synthesized
  source 1..20: mol_type = other DNA
ggggttgggagaggggcgat

SEQ ID NO: 62596 - DNA, 20 bp, synthetic construct
  misc_feature 1..20: note = chemically synthesized
  source 1..20: mol_type = other DNA
gggttgggagaggggcgatt

SEQ ID NO: 62597 - DNA, 20 bp, synthetic construct
  misc_feature 1..20: note = chemically synthesized
  source 1..20: mol_type = other DNA
agaggggcgattgggcaacc

SEQ ID NO: 62598 - DNA, 20 bp, synthetic construct
  misc_feature 1..20: note = chemically synthesized
  source 1..20: mol_type = other DNA
gcaacccggctgcacaaaca

SEQ ID NO: 62599 - DNA, 20 bp, synthetic construct
  misc_feature 1..20: note = chemically synthesized
  source 1..20: mol_type = other DNA
caacccggctgcacaaacac

SEQ ID NO: 62600 - DNA, 20 bp, synthetic construct
  misc_feature 1..20: note = chemically synthesized
  source 1..20: mol_type = other DNA
acccggctgcacaaacacgg

SEQ ID NO: 62601 - DNA, 20 bp, synthetic construct
  misc_feature 1..20: note = chemically synthesized
  source 1..20: mol_type = other DNA
cccggctgcacaaacacggg

SEQ ID NO: 62602 - DNA, 20 bp, synthetic construct
  misc_feature 1..20: note = chemically synthesized
  source 1..20: mol_type = other DNA
tgcacaaacacgggaggtca

SEQ ID NO: 62603 - DNA, 20 bp, synthetic construct
  misc_feature 1..20: note = chemically synthesized
  source 1..20: mol_type = other DNA
gggaggtcaaagattgcgcc

SEQ ID NO: 62604 - DNA, 20 bp, synthetic construct
  misc_feature 1..20: note = chemically synthesized
  source 1..20: mol_type = other DNA
aagattgcgcccagcccgcc

SEQ ID NO: 62605 - DNA, 20 bp, synthetic construct
  misc_feature 1..20: note = chemically synthesized
  source 1..20: mol_type = other DNA
agattgcgcccagcccgccc

SEQ ID NO: 62606 - DNA, 20 bp, synthetic construct
  misc_feature 1..20: note = chemically synthesized
  source 1..20: mol_type = other DNA
tgcgcccagcccgcccaggc

SEQ ID NO: 62607 - DNA, 20 bp, synthetic construct
  misc_feature 1..20: note = chemically synthesized
  source 1..20: mol_type = other DNA
gcgcccagcccgcccaggcc

SEQ ID NO: 62608 - DNA, 20 bp, synthetic construct
  misc_feature 1..20: note = chemically synthesized
  source 1..20: mol_type = other DNA
cagcccgcccaggccgggaa

SEQ ID NO: 62609 - DNA, 20 bp, synthetic construct
  misc_feature 1..20: note = chemically synthesized
  source 1..20: mol_type = other DNA
cccaggccgggaatggaata

SEQ ID NO: 62610 - DNA, 20 bp, synthetic construct
  misc_feature 1..20: note = chemically synthesized
  source 1..20: mol_type = other DNA
ccaggccgggaatggaataa

SEQ ID NO: 62611 - DNA, 20 bp, synthetic construct
  misc_feature 1..20: note = chemically synthesized
  source 1..20: mol_type = other DNA
caggccgggaatggaataaa

SEQ ID NO: 62612 - DNA, 20 bp, synthetic construct
  misc_feature 1..20: note = chemically synthesized
  source 1..20: mol_type = other DNA
gggaatggaataaagggacg

SEQ ID NO: 62613 - DNA, 20 bp, synthetic construct
  misc_feature 1..20: note = chemically synthesized
  source 1..20: mol_type = other DNA
ggaatggaataaagggacgc

SEQ ID NO: 62614 - DNA, 20 bp, synthetic construct
  misc_feature 1..20: note = chemically synthesized
  source 1..20: mol_type = other DNA
gaatggaataaagggacgcg

SEQ ID NO: 62615 - DNA, 20 bp, synthetic construct
  misc_feature 1..20: note = chemically synthesized
  source 1..20: mol_type = other DNA
aataaagggacgcggggcgc

SEQ ID NO: 62616 - DNA, 20 bp, synthetic construct
  misc_feature 1..20: note = chemically synthesized
  source 1..20: mol_type = other DNA
taaagggacgcggggcgccg

SEQ ID NO: 62617 - DNA, 20 bp, synthetic construct
  misc_feature 1..20: note = chemically synthesized
  source 1..20: mol_type = other DNA
aaagggacgcggggcgccgg

SEQ ID NO: 62618 - DNA, 20 bp, synthetic construct
  misc_feature 1..20: note = chemically synthesized
  source 1..20: mol_type = other DNA
gcggggcgccggaggctgca

SEQ ID NO: 62619 - DNA, 20 bp, synthetic construct
  misc_feature 1..20: note = chemically synthesized
  source 1..20: mol_type = other DNA
gggcgccggaggctgcacag

SEQ ID NO: 62620 - DNA, 20 bp, synthetic construct
  misc_feature 1..20: note = chemically synthesized
  source 1..20: mol_type = other DNA
gccggaggctgcacagaagc

SEQ ID NO: 62621 - DNA, 20 bp, synthetic construct
  misc_feature 1..20: note = chemically synthesized
  source 1..20: mol_type = other DNA
gtccgactgtgctcgctgct

SEQ ID NO: 62622 - DNA, 20 bp, synthetic construct
  misc_feature 1..20: note = chemically synthesized
  source 1..20: mol_type = other DNA
tcgctgctcagcgccgcacc

SEQ ID NO: 62623 - DNA, 20 bp, synthetic construct
  misc_feature 1..20: note = chemically synthesized
  source 1..20: mol_type = other DNA
ctgctcagcgccgcacccgg

SEQ ID NO: 62624 - DNA, 20 bp, synthetic construct
  misc_feature 1..20: note = chemically synthesized
  source 1..20: mol_type = other DNA
cagcgccgcacccggaagat

SEQ ID NO: 62625 - DNA, 20 bp, synthetic construct
  misc_feature 1..20: note = chemically synthesized
  source 1..20: mol_type = other DNA
agcgccgcacccggaagatg

SEQ ID NO: 62626 - DNA, 20 bp, synthetic construct
  misc_feature 1..20: note = chemically synthesized
  source 1..20: mol_type = other DNA
ccggaagatgaggctcgccg

SEQ ID NO: 62627 - DNA, 20 bp, synthetic construct
  misc_feature 1..20: note = chemically synthesized
  source 1..20: mol_type = other DNA
cggaagatgaggctcgccgt

SEQ ID NO: 62628 - DNA, 20 bp, synthetic construct
  misc_feature 1..20: note = chemically synthesized
  source 1..20: mol_type = other DNA
gaagatgaggctcgccgtgg

SEQ ID NO: 62629 - DNA, 20 bp, synthetic construct
  misc_feature 1..20: note = chemically synthesized
  source 1..20: mol_type = other DNA
gctcgccgtgggagccctgc

SEQ ID NO: 62630 - DNA, 20 bp, synthetic construct
  misc_feature 1..20: note = chemically synthesized
  source 1..20: mol_type = other DNA
cctgctggtctgcgccgtcc

SEQ ID NO: 62631 - DNA, 20 bp, synthetic construct
  misc_feature 1..20: note = chemically synthesized
  source 1..20: mol_type = other DNA
ctgctggtctgcgccgtcct

SEQ ID NO: 62632 - DNA, 20 bp, synthetic construct
  misc_feature 1..20: note = chemically synthesized
  source 1..20: mol_type = other DNA
tggtctgcgccgtcctgggt

SEQ ID NO: 62633 - DNA, 20 bp, synthetic construct
  misc_feature 1..20: note = chemically synthesized
  source 1..20: mol_type = other DNA
tgcgccgtcctgggtgagtg

SEQ ID NO: 62634 - DNA, 20 bp, synthetic construct
  misc_feature 1..20: note = chemically synthesized
  source 1..20: mol_type = other DNA
gcgccgtcctgggtgagtgc

SEQ ID NO: 62635 - DNA, 20 bp, synthetic construct
  misc_feature 1..20: note = chemically synthesized
  source 1..20: mol_type = other DNA
gtcctgggtgagtgcgggca

SEQ ID NO: 62636 - DNA, 20 bp, synthetic construct
  misc_feature 1..20: note = chemically synthesized
  source 1..20: mol_type = other DNA
tcctgggtgagtgcgggcac

SEQ ID NO: 62637 - DNA, 20 bp, synthetic construct
  misc_feature 1..20: note = chemically synthesized
  source 1..20: mol_type = other DNA
cctgggtgagtgcgggcacg

SEQ ID NO: 62638 - DNA, 20 bp, synthetic construct
  misc_feature 1..20: note = chemically synthesized
  source 1..20: mol_type = other DNA
gggtgagtgcgggcacgggg

SEQ ID NO: 62639 - DNA, 20 bp, synthetic construct
  misc_feature 1..20: note = chemically synthesized
  source 1..20: mol_type = other DNA
gcgggcacggggtagcaccg

SEQ ID NO: 62640 - DNA, 20 bp, synthetic construct
  misc_feature 1..20: note = chemically synthesized
  source 1..20: mol_type = other DNA
gggcacggggtagcaccgca

SEQ ID NO: 62641 - DNA, 20 bp, synthetic construct
  misc_feature 1..20: note = chemically synthesized
  source 1..20: mol_type = other DNA
gggtagcaccgcagagtcgc

SEQ ID NO: 62642 - DNA, 20 bp, synthetic construct
  misc_feature 1..20: note = chemically synthesized
  source 1..20: mol_type = other DNA
cccgcgcgttccctgcaacc

SEQ ID NO: 62643 - DNA, 20 bp, synthetic construct
  misc_feature 1..20: note = chemically synthesized
  source 1..20: mol_type = other DNA
ccgcgcgttccctgcaaccc

SEQ ID NO: 62644 - DNA, 20 bp, synthetic construct
  misc_feature 1..20: note = chemically synthesized
  source 1..20: mol_type = other DNA
cgcgttccctgcaacccggg

SEQ ID NO: 62645 - DNA, 20 bp, synthetic construct
  misc_feature 1..20: note = chemically synthesized
  source 1..20: mol_type = other DNA
caacccgggcggccaccgcg

SEQ ID NO: 62646 - DNA, 20 bp, synthetic construct
  misc_feature 1..20: note = chemically synthesized
  source 1..20: mol_type = other DNA
gcctgcatgcactccgcgct

SEQ ID NO: 62647 - DNA, 20 bp, synthetic construct
  misc_feature 1..20: note = chemically synthesized
  source 1..20: mol_type = other DNA
cctgcatgcactccgcgctc

SEQ ID NO: 62648 - DNA, 20 bp, synthetic construct
  misc_feature 1..20: note = chemically synthesized
  source 1..20: mol_type = other DNA
catgcactccgcgctcaggc

SEQ ID NO: 62649 - DNA, 20 bp, synthetic construct
  misc_feature 1..20: note = chemically synthesized
  source 1..20: mol_type = other DNA
gcactccgcgctcaggctgg

SEQ ID NO: 62650 - DNA, 20 bp, synthetic construct
  misc_feature 1..20: note = chemically synthesized
  source 1..20: mol_type = other DNA
ccgcgctcaggctggaagcc

SEQ ID NO: 62651 - DNA, 20 bp, synthetic construct
  misc_feature 1..20: note = chemically synthesized
  source 1..20: mol_type = other DNA
cgcgctcaggctggaagcct

SEQ ID NO: 62652 - DNA, 20 bp, synthetic construct
  misc_feature 1..20: note = chemically synthesized
  source 1..20: mol_type = other DNA
aggctggaagcctgggtgtc

SEQ ID NO: 62653 - DNA, 20 bp, synthetic construct
  misc_feature 1..20: note = chemically synthesized
  source 1..20: mol_type = other DNA
ggctggaagcctgggtgtct

SEQ ID NO: 62654 - DNA, 20 bp, synthetic construct
  misc_feature 1..20: note = chemically synthesized
  source 1..20: mol_type = other DNA
gcctctctacgccccacccc

SEQ ID NO: 62655 - DNA, 20 bp, synthetic construct
  misc_feature 1..20: note = chemically synthesized
  source 1..20: mol_type = other DNA
ccccacccctggcctttgct

SEQ ID NO: 62656 - DNA, 20 bp, synthetic construct
  misc_feature 1..20: note = chemically synthesized
  source 1..20: mol_type = other DNA
cccacccctggcctttgctt

SEQ ID NO: 62657 - DNA, 20 bp, synthetic construct
  misc_feature 1..20: note = chemically synthesized
  source 1..20: mol_type = other DNA
ctggcctttgcttgggcttc

SEQ ID NO: 62658 - DNA, 20 bp, synthetic construct
  misc_feature 1..20: note = chemically synthesized
  source 1..20: mol_type = other DNA
tccccctcctcctctttgtc

SEQ ID NO: 62659 - DNA, 20 bp, synthetic construct
  misc_feature 1..20: note = chemically synthesized
  source 1..20: mol_type = other DNA
tctttgtccagtaaatcttg

SEQ ID NO: 62660 - DNA, 20 bp, synthetic construct
  misc_feature 1..20: note = chemically synthesized
  source 1..20: mol_type = other DNA
ttgtccagtaaatcttgcag

SEQ ID NO: 62661 - DNA, 20 bp, synthetic construct
  misc_feature 1..20: note = chemically synthesized
  source 1..20: mol_type = other DNA
agcagtgaaatacaataaat

SEQ ID NO: 62662 - DNA, 20 bp, synthetic construct
  misc_feature 1..20: note = chemically synthesized
  source 1..20: mol_type = other DNA
cagtgaaatacaataaatca

SEQ ID NO: 62663 - DNA, 20 bp, synthetic construct
  misc_feature 1..20: note = chemically synthesized
  source 1..20: mol_type = other DNA
taaatcagagcacgtctaac

SEQ ID NO: 62664 - DNA, 20 bp, synthetic construct
  misc_feature 1..20: note = chemically synthesized
  source 1..20: mol_type = other DNA
aaatcagagcacgtctaacc

SEQ ID NO: 62665 - DNA, 20 bp, synthetic construct
  misc_feature 1..20: note = chemically synthesized
  source 1..20: mol_type = other DNA
ctttgctgctgcctcttgtc

SEQ ID NO: 62666 - DNA, 20 bp, synthetic construct
  misc_feature 1..20: note = chemically synthesized
  source 1..20: mol_type = other DNA
cttgtcaagtccgaactcct

SEQ ID NO: 62667 - DNA, 20 bp, synthetic construct
  misc_feature 1..20: note = chemically synthesized
  source 1..20: mol_type = other DNA
caagtccgaactccttagca

SEQ ID NO: 62668 - DNA, 20 bp, synthetic construct
  misc_feature 1..20: note = chemically synthesized
  source 1..20: mol_type = other DNA
aactccttagcatggcattc

SEQ ID NO: 62669 - DNA, 20 bp, synthetic construct
  misc_feature 1..20: note = chemically synthesized
  source 1..20: mol_type = other DNA
actccttagcatggcattca

SEQ ID NO: 62670 - DNA, 20 bp, synthetic construct
  misc_feature 1..20: note = chemically synthesized
  source 1..20: mol_type = other DNA
gcatggcattcaaggcctcc

SEQ ID NO: 62671 - DNA, 20 bp, synthetic construct
  misc_feature 1..20: note = chemically synthesized
  source 1..20: mol_type = other DNA
catggcattcaaggcctccc

SEQ ID NO: 62672 - DNA, 20 bp, synthetic construct
  misc_feature 1..20: note = chemically synthesized
  source 1..20: mol_type = other DNA
gggtctgaccattccccttt

SEQ ID NO: 62673 - DNA, 20 bp, synthetic construct
  misc_feature 1..20: note = chemically synthesized
  source 1..20: mol_type = other DNA
gtctgaccattcccctttca

SEQ ID NO: 62674 - DNA, 20 bp, synthetic construct
  misc_feature 1..20: note = chemically synthesized
  source 1..20: mol_type = other DNA
tctgaccattcccctttcag

SEQ ID NO: 62675 - DNA, 20 bp, synthetic construct
  misc_feature 1..20: note = chemically synthesized
  source 1..20: mol_type = other DNA
tttcagaggctgatgtcccc

SEQ ID NO: 62676 - DNA, 20 bp, synthetic construct
  misc_feature 1..20: note = chemically synthesized
  source 1..20: mol_type = other DNA
ttcagaggctgatgtcccct

SEQ ID NO: 62677 - DNA, 20 bp, synthetic construct
  misc_feature 1..20: note = chemically synthesized
  source 1..20: mol_type = other DNA
ctgatgtcccctgggtgccc

SEQ ID NO: 62678 - DNA, 20 bp, synthetic construct
  misc_feature 1..20: note = chemically synthesized
  source 1..20: mol_type = other DNA
tgatgtcccctgggtgccct

SEQ ID NO: 62679 - DNA, 20 bp, synthetic construct
  misc_feature 1..20: note = chemically synthesized
  source 1..20: mol_type = other DNA
atgtcccctgggtgccctgg

SEQ ID NO: 62680 - DNA, 20 bp, synthetic construct
  misc_feature 1..20: note = chemically synthesized
  source 1..20: mol_type = other DNA
cctgggtgccctgggagctg

SEQ ID NO: 62681 - DNA, 20 bp, synthetic construct
  misc_feature 1..20: note = chemically synthesized
  source 1..20: mol_type = other DNA
ggagctgtagatgtcctgcc

SEQ ID NO: 62682 - DNA, 20 bp, synthetic construct
  misc_feature 1..20: note = chemically synthesized
  source 1..20: mol_type = other DNA
gagctgtagatgtcctgcca

SEQ ID NO: 62683 - DNA, 20 bp, synthetic construct
  misc_feature 1..20: note = chemically synthesized
  source 1..20: mol_type = other DNA
ctgtagatgtcctgccaagg

SEQ ID NO: 62684 - DNA, 20 bp, synthetic construct
  misc_feature 1..20: note = chemically synthesized
  source 1..20: mol_type = other DNA
tagatgtcctgccaaggaag

SEQ ID NO: 62685 - DNA, 20 bp, synthetic construct
  misc_feature 1..20: note = chemically synthesized
  source 1..20: mol_type = other DNA
gccaaggaagcggtgccatc

SEQ ID NO: 62686 - DNA, 20 bp, synthetic construct
  misc_feature 1..20: note = chemically synthesized
  source 1..20: mol_type = other DNA
aaggaagcggtgccatcgag

SEQ ID NO: 62687 - DNA, 20 bp, synthetic construct
  misc_feature 1..20: note = chemically synthesized
  source 1..20: mol_type = other DNA
aagcggtgccatcgagcggt

SEQ ID NO: 62688 - DNA, 20 bp, synthetic construct
  misc_feature 1..20: note = chemically synthesized
  source 1..20: mol_type = other DNA
gcggtgccatcgagcggtca

SEQ ID NO: 62689 - DNA, 20 bp, synthetic construct
  misc_feature 1..20: note = chemically synthesized
  source 1..20: mol_type = other DNA
gccatcgagcggtcagagca

SEQ ID NO: 62690 - DNA, 20 bp, synthetic construct
  misc_feature 1..20: note = chemically synthesized
  source 1..20: mol_type = other DNA
ccatcgagcggtcagagcat

SEQ ID NO: 62691 - DNA, 20 bp, synthetic construct
  misc_feature 1..20: note = chemically synthesized
  source 1..20: mol_type = other DNA
catcgagcggtcagagcatg

SEQ ID NO: 62692 - DNA, 20 bp, synthetic construct
  misc_feature 1..20: note = chemically synthesized
  source 1..20: mol_type = other DNA
cggtcagagcatggggtttg

SEQ ID NO: 62693 - DNA, 20 bp, synthetic construct
  misc_feature 1..20: note = chemically synthesized
  source 1..20: mol_type = other DNA
cagagcatggggtttgaagc

SEQ ID NO: 62694 - DNA, 20 bp, synthetic construct
  misc_feature 1..20: note = chemically synthesized
  source 1..20: mol_type = other DNA
gggtttgaagccagacttct

SEQ ID NO: 62695 - DNA, 20 bp, synthetic construct
  misc_feature 1..20: note = chemically synthesized
  source 1..20: mol_type = other DNA
aagccagacttcttggatcc

SEQ ID NO: 62696 - DNA, 20 bp, synthetic construct
  misc_feature 1..20: note = chemically synthesized
  source 1..20: mol_type = other DNA
gacttcttggatccaagtcc

SEQ ID NO: 62697 - DNA, 20 bp, synthetic construct
  misc_feature 1..20: note = chemically synthesized
  source 1..20: mol_type = other DNA
tcttggatccaagtcctggc

SEQ ID NO: 62698 - DNA, 20 bp, synthetic construct
  misc_feature 1..20: note = chemically synthesized
  source 1..20: mol_type = other DNA
agtcctggccggctcctcac

SEQ ID NO: 62699 - DNA, 20 bp, synthetic construct
  misc_feature 1..20: note = chemically synthesized
  source 1..20: mol_type = other DNA
gtcctggccggctcctcacc

SEQ ID NO: 62700 - DNA, 20 bp, synthetic construct
  misc_feature 1..20: note = chemically synthesized
  source 1..20: mol_type = other DNA
tcctggccggctcctcacca

SEQ ID NO: 62701 - DNA, 20 bp, synthetic construct
  misc_feature 1..20: note = chemically synthesized
  source 1..20: mol_type = other DNA
ctggccggctcctcaccagg

SEQ ID NO: 62702 - DNA, 20 bp, synthetic construct
  misc_feature 1..20: note = chemically synthesized
  source 1..20: mol_type = other DNA
tggccggctcctcaccaggg

SEQ ID NO: 62703 - DNA, 20 bp, synthetic construct
  misc_feature 1..20: note = chemically synthesized
  source 1..20: mol_type = other DNA
ggccggctcctcaccaggga

SEQ ID NO: 62704 - DNA, 20 bp, synthetic construct
  misc_feature 1..20: note = chemically synthesized
  source 1..20: mol_type = other DNA
gccggctcctcaccagggag

SEQ ID NO: 62705 - DNA, 20 bp, synthetic construct
  misc_feature 1..20: note = chemically synthesized
  source 1..20: mol_type = other DNA
ccggctcctcaccagggagg

SEQ ID NO: 62706 - DNA, 20 bp, synthetic construct
  misc_feature 1..20: note = chemically synthesized
  source 1..20: mol_type = other DNA
caccagggagggggtcatca

SEQ ID NO: 62707 - DNA, 20 bp, synthetic construct
  misc_feature 1..20: note = chemically synthesized
  source 1..20: mol_type = other DNA
gggtcatcacagcacttgcc

SEQ ID NO: 62708 - DNA, 20 bp, synthetic construct
  misc_feature 1..20: note = chemically synthesized
  source 1..20: mol_type = other DNA
ggtcatcacagcacttgcct

SEQ ID NO: 62709 - DNA, 20 bp, synthetic construct
  misc_feature 1..20: note = chemically synthesized
  source 1..20: mol_type = other DNA
tcatcacagcacttgcctgg

SEQ ID NO: 62710 - DNA, 20 bp, synthetic construct
  misc_feature 1..20: note = chemically synthesized
  source 1..20: mol_type = other DNA
catcacagcacttgcctggg

SEQ ID NO: 62711 - DNA, 20 bp, synthetic construct
  misc_feature 1..20: note = chemically synthesized
  source 1..20: mol_type = other DNA
atcacagcacttgcctggga

SEQ ID NO: 62712 - DNA, 20 bp, synthetic construct
  misc_feature 1..20: note = chemically synthesized
  source 1..20: mol_type = other DNA
cttgcctgggagggtcaaat

SEQ ID NO: 62713 - DNA, 20 bp, synthetic construct
  misc_feature 1..20: note = chemically synthesized
  source 1..20: mol_type = other DNA
ttgcctgggagggtcaaatg

SEQ ID NO: 62714 - DNA, 20 bp, synthetic construct
  misc_feature 1..20: note = chemically synthesized
  source 1..20: mol_type = other DNA
tgcctgggagggtcaaatga

SEQ ID NO: 62715 - DNA, 20 bp, synthetic construct
  misc_feature 1..20: note = chemically synthesized
  source 1..20: mol_type = other DNA
tgggagggtcaaatgagggt

SEQ ID NO: 62716 - DNA, 20 bp, synthetic construct
  misc_feature 1..20: note = chemically synthesized
  source 1..20: mol_type = other DNA
agggtcaaatgagggtcagc

SEQ ID NO: 62717 - DNA, 20 bp, synthetic construct
  misc_feature 1..20: note = chemically synthesized
  source 1..20: mol_type = other DNA
gggtcaaatgagggtcagcg

SEQ ID NO: 62718 - DNA, 20 bp, synthetic construct
  misc_feature 1..20: note = chemically synthesized
  source 1..20: mol_type = other DNA
tcaaatgagggtcagcgagg

SEQ ID NO: 62719 - DNA, 20 bp, synthetic construct
  misc_feature 1..20: note = chemically synthesized
  source 1..20: mol_type = other DNA
aatgagggtcagcgaggtgg

SEQ ID NO: 62720 - DNA, 20 bp, synthetic construct
  misc_feature 1..20: note = chemically synthesized
  source 1..20: mol_type = other DNA
tcagcgaggtggcagatgct

SEQ ID NO: 62721 - DNA, 20 bp, synthetic construct
  misc_feature 1..20: note = chemically synthesized
  source 1..20: mol_type = other DNA
aggtggcagatgctgagtac

SEQ ID NO: 62722 - DNA, 20 bp, synthetic construct
  misc_feature 1..20: note = chemically synthesized
  source 1..20: mol_type = other DNA
tggcagatgctgagtaccag

SEQ ID NO: 62723 - DNA, 20 bp, synthetic construct
  misc_feature 1..20: note = chemically synthesized
  source 1..20: mol_type = other DNA
cagatgctgagtaccagtgg

SEQ ID NO: 62724 - DNA, 20 bp, synthetic construct
  misc_feature 1..20: note = chemically synthesized
  source 1..20: mol_type = other DNA
atgttgcacacatcctgcta

SEQ ID NO: 62725 - DNA, 20 bp, synthetic construct
  misc_feature 1..20: note = chemically synthesized
  source 1..20: mol_type = other DNA
tgttgcacacatcctgctat

SEQ ID NO: 62726 - DNA, 20 bp, synthetic construct
  misc_feature 1..20: note = chemically synthesized
  source 1..20: mol_type = other DNA
gttgcacacatcctgctatg

SEQ ID NO: 62727 - DNA, 20 bp, synthetic construct
  misc_feature 1..20: note = chemically synthesized
  source 1..20: mol_type = other DNA
gcacacatcctgctatgggg

SEQ ID NO: 62728 - DNA, 20 bp, synthetic construct
  misc_feature 1..20: note = chemically synthesized
  source 1..20: mol_type = other DNA
cacatcctgctatggggcag

SEQ ID NO: 62729 - DNA, 20 bp, synthetic construct
  misc_feature 1..20: note = chemically synthesized
  source 1..20: mol_type = other DNA
gccacactccccgacctcct

SEQ ID NO: 62730 - DNA, 20 bp, synthetic construct
  misc_feature 1..20: note = chemically synthesized
  source 1..20: mol_type = other DNA
ccacactccccgacctcctg

SEQ ID NO: 62731 - DNA, 20 bp, synthetic construct
  misc_feature 1..20: note = chemically synthesized
  source 1..20: mol_type = other DNA
cactccccgacctcctgagg

SEQ ID NO: 62732 - DNA, 20 bp, synthetic construct
  misc_feature 1..20: note = chemically synthesized
  source 1..20: mol_type = other DNA
actccccgacctcctgaggt

SEQ ID NO: 62733 - DNA, 20 bp, synthetic construct
  misc_feature 1..20: note = chemically synthesized
  source 1..20: mol_type = other DNA
ctccccgacctcctgaggtg

SEQ ID NO: 62734 - DNA, 20 bp, synthetic construct
  misc_feature 1..20: note = chemically synthesized
  source 1..20: mol_type = other DNA
taacttctgcctgccattca

SEQ ID NO: 62735 - DNA, 20 bp, synthetic construct
  misc_feature 1..20: note = chemically synthesized
  source 1..20: mol_type = other DNA
aacttctgcctgccattcat

SEQ ID NO: 62736 - DNA, 20 bp, synthetic construct
  misc_feature 1..20: note = chemically synthesized
  source 1..20: mol_type = other DNA
acttctgcctgccattcatg

SEQ ID NO: 62737 - DNA, 20 bp, synthetic construct
  misc_feature 1..20: note = chemically synthesized
  source 1..20: mol_type = other DNA
tggggcatttgtcacactgt

SEQ ID NO: 62738 - DNA, 20 bp, synthetic construct
  misc_feature 1..20: note = chemically synthesized
  source 1..20: mol_type = other DNA
ggggcatttgtcacactgtt

SEQ ID NO: 62739 - DNA, 20 bp, synthetic construct
  misc_feature 1..20: note = chemically synthesized
  source 1..20: mol_type = other DNA
gggcatttgtcacactgttg

SEQ ID NO: 62740 - DNA, 20 bp, synthetic construct
  misc_feature 1..20: note = chemically synthesized
  source 1..20: mol_type = other DNA
actgttggggcttccacgtt

SEQ ID NO: 62741 - DNA, 20 bp, synthetic construct
  misc_feature 1..20: note = chemically synthesized
  source 1..20: mol_type = other DNA
gtttagttttctctccccat

SEQ ID NO: 62742 - DNA, 20 bp, synthetic construct
  misc_feature 1..20: note = chemically synthesized
  source 1..20: mol_type = other DNA
agttttctctccccataagc

SEQ ID NO: 62743 - DNA, 20 bp, synthetic construct
  misc_feature 1..20: note = chemically synthesized
  source 1..20: mol_type = other DNA
ccataagctagcaattcctt

SEQ ID NO: 62744 - DNA, 20 bp, synthetic construct
  misc_feature 1..20: note = chemically synthesized
  source 1..20: mol_type = other DNA
ataagctagcaattccttga

SEQ ID NO: 62745 - DNA, 20 bp, synthetic construct
  misc_feature 1..20: note = chemically synthesized
  source 1..20: mol_type = other DNA
aagctagcaattccttgaga

SEQ ID NO: 62746 - DNA, 20 bp, synthetic construct
  misc_feature 1..20: note = chemically synthesized
  source 1..20: mol_type = other DNA
agctagcaattccttgagag

SEQ ID NO: 62747 - DNA, 20 bp, synthetic construct
  misc_feature 1..20: note = chemically synthesized
  source 1..20: mol_type = other DNA
tacttgcctttatccccgca

SEQ ID NO: 62748 - DNA, 20 bp, synthetic construct
  misc_feature 1..20: note = chemically synthesized
  source 1..20: mol_type = other DNA
cttgcctttatccccgcaca

SEQ ID NO: 62749 - DNA, 20 bp, synthetic construct
  misc_feature 1..20: note = chemically synthesized
  source 1..20: mol_type = other DNA
tccccgcacagagcacttca

SEQ ID NO: 62750 - DNA, 20 bp, synthetic construct
  misc_feature 1..20: note = chemically synthesized
  source 1..20: mol_type = other DNA
ccccgcacagagcacttcac

SEQ ID NO: 62751 - DNA, 20 bp, synthetic construct
  misc_feature 1..20: note = chemically synthesized
  source 1..20: mol_type = other DNA
gagcacttcacaggctgtgc

SEQ ID NO: 62752 - DNA, 20 bp, synthetic construct
  misc_feature 1..20: note = chemically synthesized
  source 1..20: mol_type = other DNA
agcacttcacaggctgtgca

SEQ ID NO: 62753 - DNA, 20 bp, synthetic construct
  misc_feature 1..20: note = chemically synthesized
  source 1..20: mol_type = other DNA
gtgcaaggtaatgctccact

SEQ ID NO: 62754 - DNA, 20 bp, synthetic construct
  misc_feature 1..20: note = chemically synthesized
  source 1..20: mol_type = other DNA
tgcaaggtaatgctccactg

SEQ ID NO: 62755 - DNA, 20 bp, synthetic construct
  misc_feature 1..20: note = chemically synthesized
  source 1..20: mol_type = other DNA
tgaggacacattctcgccta

SEQ ID NO: 62756 - DNA, 20 bp, synthetic construct
  misc_feature 1..20: note = chemically synthesized
  source 1..20: mol_type = other DNA
gaggacacattctcgcctat

SEQ ID NO: 62757 - DNA, 20 bp, synthetic construct
  misc_feature 1..20: note = chemically synthesized
  source 1..20: mol_type = other DNA
attctcgcctatgggaactc

SEQ ID NO: 62758 - DNA, 20 bp, synthetic construct
  misc_feature 1..20: note = chemically synthesized
  source 1..20: mol_type = other DNA
tctcgcctatgggaactctg

SEQ ID NO: 62759 - DNA, 20 bp, synthetic construct
  misc_feature 1..20: note = chemically synthesized
  source 1..20: mol_type = other DNA
ctcgcctatgggaactctgg

SEQ ID NO: 62760 - DNA, 20 bp, synthetic construct
  misc_feature 1..20: note = chemically synthesized
  source 1..20: mol_type = other DNA
gcctatgggaactctggagg

SEQ ID NO: 62761 - DNA, 20 bp, synthetic construct
  misc_feature 1..20: note = chemically synthesized
  source 1..20: mol_type = other DNA
cctatgggaactctggaggc

SEQ ID NO: 62762 - DNA, 20 bp, synthetic construct
  misc_feature 1..20: note = chemically synthesized
  source 1..20: mol_type = other DNA
ctatgggaactctggaggca

SEQ ID NO: 62763 - DNA, 20 bp, synthetic construct
  misc_feature 1..20: note = chemically synthesized
  source 1..20: mol_type = other DNA
actctggaggcagggctttg

SEQ ID NO: 62764 - DNA, 20 bp, synthetic construct
  misc_feature 1..20: note = chemically synthesized
  source 1..20: mol_type = other DNA
tctggaggcagggctttgtg

SEQ ID NO: 62765 - DNA, 20 bp, synthetic construct
  misc_feature 1..20: note = chemically synthesized
  source 1..20: mol_type = other DNA
ctggaggcagggctttgtgg

SEQ ID NO: 62766 - DNA, 20 bp, synthetic construct
  misc_feature 1..20: note = chemically synthesized
  source 1..20: mol_type = other DNA
tggaggcagggctttgtgga

SEQ ID NO: 62767 - DNA, 20 bp, synthetic construct
  misc_feature 1..20: note = chemically synthesized
  source 1..20: mol_type = other DNA
ggaggcagggctttgtggag

SEQ ID NO: 62768 - DNA, 20 bp, synthetic construct
  misc_feature 1..20: note = chemically synthesized
  source 1..20: mol_type = other DNA
gctttgtggaggggctgcca

SEQ ID NO: 62769 - DNA, 20 bp, synthetic construct
  misc_feature 1..20: note = chemically synthesized
  source 1..20: mol_type = other DNA
ctttgtggaggggctgccac

SEQ ID NO: 62770 - DNA, 20 bp, synthetic construct
  misc_feature 1..20: note = chemically synthesized
  source 1..20: mol_type = other DNA
cacaggcttatgttgcctcc

SEQ ID NO: 62771 - DNA, 20 bp, synthetic construct
  misc_feature 1..20: note = chemically synthesized
  source 1..20: mol_type = other DNA
acaggcttatgttgcctcct

SEQ ID NO: 62772 - DNA, 20 bp, synthetic construct
  misc_feature 1..20: note = chemically synthesized
  source 1..20: mol_type = other DNA
ttgcctcctaggatttccca

SEQ ID NO: 62773 - DNA, 20 bp, synthetic construct
  misc_feature 1..20: note = chemically synthesized
  source 1..20: mol_type = other DNA
tgcctcctaggatttcccat

SEQ ID NO: 62774 - DNA, 20 bp, synthetic construct
  misc_feature 1..20: note = chemically synthesized
  source 1..20: mol_type = other DNA
cctaggatttcccatgggcc

SEQ ID NO: 62775 - DNA, 20 bp, synthetic construct
  misc_feature 1..20: note = chemically synthesized
  source 1..20: mol_type = other DNA
taggatttcccatgggccaa

SEQ ID NO: 62776 - DNA, 20 bp, synthetic construct
  misc_feature 1..20: note = chemically synthesized
  source 1..20: mol_type = other DNA
aggatttcccatgggccaag

SEQ ID NO: 62777 - DNA, 20 bp, synthetic construct
  misc_feature 1..20: note = chemically synthesized
  source 1..20: mol_type = other DNA
ggatttcccatgggccaaga

SEQ ID NO: 62778 - DNA, 20 bp, synthetic construct
  misc_feature 1..20: note = chemically synthesized
  source 1..20: mol_type = other DNA
ccatgggccaagagggaaaa

SEQ ID NO: 62779 - DNA, 20 bp, synthetic construct
  misc_feature 1..20: note = chemically synthesized
  source 1..20: mol_type = other DNA
catgggccaagagggaaaat

SEQ ID NO: 62780 - DNA, 20 bp, synthetic construct
  misc_feature 1..20: note = chemically synthesized
  source 1..20: mol_type = other DNA
atgggccaagagggaaaatg

SEQ ID NO: 62781 - DNA, 20 bp, synthetic construct
  misc_feature 1..20: note = chemically synthesized
  source 1..20: mol_type = other DNA
tgggccaagagggaaaatgg

SEQ ID NO: 62782 - DNA, 20 bp, synthetic construct
  misc_feature 1..20: note = chemically synthesized
  source 1..20: mol_type = other DNA
agagggaaaatgggggtcgc

SEQ ID NO: 62783 - DNA, 20 bp, synthetic construct
  misc_feature 1..20: note = chemically synthesized
  source 1..20: mol_type = other DNA
gagggaaaatgggggtcgct

SEQ ID NO: 62784 - DNA, 20 bp, synthetic construct
  misc_feature 1..20: note = chemically synthesized
  source 1..20: mol_type = other DNA
agggaaaatgggggtcgctg

SEQ ID NO: 62785 - DNA, 20 bp, synthetic construct
  misc_feature 1..20: note = chemically synthesized
  source 1..20: mol_type = other DNA
gaaaatgggggtcgctgggg

SEQ ID NO: 62786 - DNA, 20 bp, synthetic construct
  misc_feature 1..20: note = chemically synthesized
  source 1..20: mol_type = other DNA
gtcgctggggtggccatccc

SEQ ID NO: 62787 - DNA, 20 bp, synthetic construct
  misc_feature 1..20: note = chemically synthesized
  source 1..20: mol_type = other DNA
gctggggtggccatccctgg

SEQ ID NO: 62788 - DNA, 20 bp, synthetic construct
  misc_feature 1..20: note = chemically synthesized
  source 1..20: mol_type = other DNA
tggcccctcctcatgcatcc

SEQ ID NO: 62789 - DNA, 20 bp, synthetic construct
  misc_feature 1..20: note = chemically synthesized
  source 1..20: mol_type = other DNA
gcccctcctcatgcatcctg

SEQ ID NO: 62790 - DNA, 20 bp, synthetic construct
  misc_feature 1..20: note = chemically synthesized
  source 1..20: mol_type = other DNA
ccctcctcatgcatcctgga

SEQ ID NO: 62791 - DNA, 20 bp, synthetic construct
  misc_feature 1..20: note = chemically synthesized
  source 1..20: mol_type = other DNA
tcatgcatcctggagagctg

SEQ ID NO: 62792 - DNA, 20 bp, synthetic construct
  misc_feature 1..20: note = chemically synthesized
  source 1..20: mol_type = other DNA
catgcatcctggagagctgt

SEQ ID NO: 62793 - DNA, 20 bp, synthetic construct
  misc_feature 1..20: note = chemically synthesized
  source 1..20: mol_type = other DNA
agctgtgggcctcctctcca

SEQ ID NO: 62794 - DNA, 20 bp, synthetic construct
  misc_feature 1..20: note = chemically synthesized
  source 1..20: mol_type = other DNA
gctgtgggcctcctctccac

SEQ ID NO: 62795 - DNA, 20 bp, synthetic construct
  misc_feature 1..20: note = chemically synthesized
  source 1..20: mol_type = other DNA
cctcctctccacaggctttg

SEQ ID NO: 62796 - DNA, 20 bp, synthetic construct
  misc_feature 1..20: note = chemically synthesized
  source 1..20: mol_type = other DNA
caggctttgtggatcttctt

SEQ ID NO: 62797 - DNA, 20 bp, synthetic construct
  misc_feature 1..20: note = chemically synthesized
  source 1..20: mol_type = other DNA
ggctttgtggatcttcttca

SEQ ID NO: 62798 - DNA, 20 bp, synthetic construct
  misc_feature 1..20: note = chemically synthesized
  source 1..20: mol_type = other DNA
ttgtggatcttcttcagagc

SEQ ID NO: 62799 - DNA, 20 bp, synthetic construct
  misc_feature 1..20: note = chemically synthesized
  source 1..20: mol_type = other DNA
ggatcttcttcagagccagt

SEQ ID NO: 62800 - DNA, 20 bp, synthetic construct
  misc_feature 1..20: note = chemically synthesized
  source 1..20: mol_type = other DNA
cttcttcagagccagtgagt

SEQ ID NO: 62801 - DNA, 20 bp, synthetic construct
  misc_feature 1..20: note = chemically synthesized
  source 1..20: mol_type = other DNA
ccagtgagtcagccttgctg

SEQ ID NO: 62802 - DNA, 20 bp, synthetic construct
  misc_feature 1..20: note = chemically synthesized
  source 1..20: mol_type = other DNA
gtgagtcagccttgctgtgg

SEQ ID NO: 62803 - DNA, 20 bp, synthetic construct
  misc_feature 1..20: note = chemically synthesized
  source 1..20: mol_type = other DNA
gccttgctgtggtggcccac

SEQ ID NO: 62804 - DNA, 20 bp, synthetic construct
  misc_feature 1..20: note = chemically synthesized
  source 1..20: mol_type = other DNA
ccttgctgtggtggcccaca

SEQ ID NO: 62805 - DNA, 20 bp, synthetic construct
  misc_feature 1..20: note = chemically synthesized
  source 1..20: mol_type = other DNA
ttgctgtggtggcccacaag

SEQ ID NO: 62806 - DNA, 20 bp, synthetic construct
  misc_feature 1..20: note = chemically synthesized
  source 1..20: mol_type = other DNA
ctgtggtggcccacaaggag

SEQ ID NO: 62807 - DNA, 20 bp, synthetic construct
  misc_feature 1..20: note = chemically synthesized
  source 1..20: mol_type = other DNA
gtggtggcccacaaggagtg

SEQ ID NO: 62808 - DNA, 20 bp, synthetic construct
  misc_feature 1..20: note = chemically synthesized
  source 1..20: mol_type = other DNA
cccacaaggagtggagatga

SEQ ID NO: 62809 - DNA, 20 bp, synthetic construct
  misc_feature 1..20: note = chemically synthesized
  source 1..20: mol_type = other DNA
cacaaggagtggagatgaca

SEQ ID NO: 62810 - DNA, 20 bp, synthetic construct
  misc_feature 1..20: note = chemically synthesized
  source 1..20: mol_type = other DNA
acaaggagtggagatgacag

SEQ ID NO: 62811 - DNA, 20 bp, synthetic construct
  misc_feature 1..20: note = chemically synthesized
  source 1..20: mol_type = other DNA
caaggagtggagatgacaga

SEQ ID NO: 62812 - DNA, 20 bp, synthetic construct
  misc_feature 1..20: note = chemically synthesized
  source 1..20: mol_type = other DNA
gtggagatgacagagggcct

SEQ ID NO: 62813 - DNA, 20 bp, synthetic construct
  misc_feature 1..20: note = chemically synthesized
  source 1..20: mol_type = other DNA
tggagatgacagagggcctt

SEQ ID NO: 62814 - DNA, 20 bp, synthetic construct
  misc_feature 1..20: note = chemically synthesized
  source 1..20: mol_type = other DNA
ggagatgacagagggccttg

SEQ ID NO: 62815 - DNA, 20 bp, synthetic construct
  misc_feature 1..20: note = chemically synthesized
  source 1..20: mol_type = other DNA
atgacagagggccttgggga

SEQ ID NO: 62816 - DNA, 20 bp, synthetic construct
  misc_feature 1..20: note = chemically synthesized
  source 1..20: mol_type = other DNA
tgacagagggccttggggac

SEQ ID NO: 62817 - DNA, 20 bp, synthetic construct
  misc_feature 1..20: note = chemically synthesized
  source 1..20: mol_type = other DNA
gacagagggccttggggaca

SEQ ID NO: 62818 - DNA, 20 bp, synthetic construct
  misc_feature 1..20: note = chemically synthesized
  source 1..20: mol_type = other DNA
gggccttggggacagggcaa

SEQ ID NO: 62819 - DNA, 20 bp, synthetic construct
  misc_feature 1..20: note = chemically synthesized
  source 1..20: mol_type = other DNA
cagggcaaaagctcatgtga

SEQ ID NO: 62820 - DNA, 20 bp, synthetic construct
  misc_feature 1..20: note = chemically synthesized
  source 1..20: mol_type = other DNA
agggcaaaagctcatgtgat

SEQ ID NO: 62821 - DNA, 20 bp, synthetic construct
  misc_feature 1..20: note = chemically synthesized
  source 1..20: mol_type = other DNA
gggcaaaagctcatgtgata

SEQ ID NO: 62822 - DNA, 20 bp, synthetic construct
  misc_feature 1..20: note = chemically synthesized
  source 1..20: mol_type = other DNA
atgctgtctctgcaaccaca

SEQ ID NO: 62823 - DNA, 20 bp, synthetic construct
  misc_feature 1..20: note = chemically synthesized
  source 1..20: mol_type = other DNA
tgcaaccacatggattttaa

SEQ ID NO: 62824 - DNA, 20 bp, synthetic construct
  misc_feature 1..20: note = chemically synthesized
  source 1..20: mol_type = other DNA
tggattttaatagttaccca

SEQ ID NO: 62825 - DNA, 20 bp, synthetic construct
  misc_feature 1..20: note = chemically synthesized
  source 1..20: mol_type = other DNA
ttttaatagttacccatggc

SEQ ID NO: 62826 - DNA, 20 bp, synthetic construct
  misc_feature 1..20: note = chemically synthesized
  source 1..20: mol_type = other DNA
tagttacccatggctggctt

SEQ ID NO: 62827 - DNA, 20 bp, synthetic construct
  misc_feature 1..20: note = chemically synthesized
  source 1..20: mol_type = other DNA
gcttcagctttttttgtgaa

SEQ ID NO: 62828 - DNA, 20 bp, synthetic construct
  misc_feature 1..20: note = chemically synthesized
  source 1..20: mol_type = other DNA
tcagctttttttgtgaatgg

SEQ ID NO: 62829 - DNA, 20 bp, synthetic construct
  misc_feature 1..20: note = chemically synthesized
  source 1..20: mol_type = other DNA
ttttgtgaatggcagccaaa

SEQ ID NO: 62830 - DNA, 20 bp, synthetic construct
  misc_feature 1..20: note = chemically synthesized
  source 1..20: mol_type = other DNA
tgaatggcagccaaaaagtg

SEQ ID NO: 62831 - DNA, 20 bp, synthetic construct
  misc_feature 1..20: note = chemically synthesized
  source 1..20: mol_type = other DNA
gccaaaaagtgtggtgaaaa

SEQ ID NO: 62832 - DNA, 20 bp, synthetic construct
  misc_feature 1..20: note = chemically synthesized
  source 1..20: mol_type = other DNA
caaaaagtgtggtgaaaatg

SEQ ID NO: 62833 - DNA, 20 bp, synthetic construct
  misc_feature 1..20: note = chemically synthesized
  source 1..20: mol_type = other DNA
aaaaagtgtggtgaaaatgg

SEQ ID NO: 62834 - DNA, 20 bp, synthetic construct
  misc_feature 1..20: note = chemically synthesized
  source 1..20: mol_type = other DNA
aaaagtgtggtgaaaatgga

SEQ ID NO: 62835 - DNA, 20 bp, synthetic construct
  misc_feature 1..20: note = chemically synthesized
  source 1..20: mol_type = other DNA
gtgtggtgaaaatggaggga

SEQ ID NO: 62836 - DNA, 20 bp, synthetic construct
  misc_feature 1..20: note = chemically synthesized
  source 1..20: mol_type = other DNA
gtgaaaatggagggatagtt

SEQ ID NO: 62837 - DNA, 20 bp, synthetic construct
  misc_feature 1..20: note = chemically synthesized
  source 1..20: mol_type = other DNA
aaaatggagggatagttcag

SEQ ID NO: 62838 - DNA, 20 bp, synthetic construct
  misc_feature 1..20: note = chemically synthesized
  source 1..20: mol_type = other DNA
aatggagggatagttcagtg

SEQ ID NO: 62839 - DNA, 20 bp, synthetic construct
  misc_feature 1..20: note = chemically synthesized
  source 1..20: mol_type = other DNA
gagggatagttcagtggaga

SEQ ID NO: 62840 - DNA, 20 bp, synthetic construct
  misc_feature 1..20: note = chemically synthesized
  source 1..20: mol_type = other DNA
gggatagttcagtggagaca

SEQ ID NO: 62841 - DNA, 20 bp, synthetic construct
  misc_feature 1..20: note = chemically synthesized
  source 1..20: mol_type = other DNA
ggatagttcagtggagacag

SEQ ID NO: 62842 - DNA, 20 bp, synthetic construct
  misc_feature 1..20: note = chemically synthesized
  source 1..20: mol_type = other DNA
gatagttcagtggagacaga

SEQ ID NO: 62843 - DNA, 20 bp, synthetic construct
  misc_feature 1..20: note = chemically synthesized
  source 1..20: mol_type = other DNA
atagttcagtggagacagag

SEQ ID NO: 62844 - DNA, 20 bp, synthetic construct
  misc_feature 1..20: note = chemically synthesized
  source 1..20: mol_type = other DNA
agttcagtggagacagaggg

SEQ ID NO: 62845 - DNA, 20 bp, synthetic construct
  misc_feature 1..20: note = chemically synthesized
  source 1..20: mol_type = other DNA
aggggagactgttgaatttg

SEQ ID NO: 62846 - DNA, 20 bp, synthetic construct
  misc_feature 1..20: note = chemically synthesized
  source 1..20: mol_type = other DNA
gggagactgttgaatttgtg

SEQ ID NO: 62847 - DNA, 20 bp, synthetic construct
  misc_feature 1..20: note = chemically synthesized
  source 1..20: mol_type = other DNA
tgttgaatttgtggagtttt

SEQ ID NO: 62848 - DNA, 20 bp, synthetic construct
  misc_feature 1..20: note = chemically synthesized
  source 1..20: mol_type = other DNA
agtttttagttcttcctaaa

SEQ ID NO: 62849 - DNA, 20 bp, synthetic construct
  misc_feature 1..20: note = chemically synthesized
  source 1..20: mol_type = other DNA
tttttagttcttcctaaaca

SEQ ID NO: 62850 - DNA, 20 bp, synthetic construct
  misc_feature 1..20: note = chemically synthesized
  source 1..20: mol_type = other DNA
tttagttcttcctaaacaga

SEQ ID NO: 62851 - DNA, 20 bp, synthetic construct
  misc_feature 1..20: note = chemically synthesized
  source 1..20: mol_type = other DNA
tcttcctaaacagagagcaa

SEQ ID NO: 62852 - DNA, 20 bp, synthetic construct
  misc_feature 1..20: note = chemically synthesized
  source 1..20: mol_type = other DNA
ctaaacagagagcaacagac

SEQ ID NO: 62853 - DNA, 20 bp, synthetic construct
  misc_feature 1..20: note = chemically synthesized
  source 1..20: mol_type = other DNA
aaacagagagcaacagacaa

SEQ ID NO: 62854 - DNA, 20 bp, synthetic construct
  misc_feature 1..20: note = chemically synthesized
  source 1..20: mol_type = other DNA
agagcaacagacaagagtta

SEQ ID NO: 62855 - DNA, 20 bp, synthetic construct
  misc_feature 1..20: note = chemically synthesized
  source 1..20: mol_type = other DNA
gttaatttaccctcaactac

SEQ ID NO: 62856 - DNA, 20 bp, synthetic construct
  misc_feature 1..20: note = chemically synthesized
  source 1..20: mol_type = other DNA
tttaccctcaactactggcc

SEQ ID NO: 62857 - DNA, 20 bp, synthetic construct
  misc_feature 1..20: note = chemically synthesized
  source 1..20: mol_type = other DNA
accctcaactactggccaag

SEQ ID NO: 62858 - DNA, 20 bp, synthetic construct
  misc_feature 1..20: note = chemically synthesized
  source 1..20: mol_type = other DNA
ccctcaactactggccaaga

SEQ ID NO: 62859 - DNA, 20 bp, synthetic construct
  misc_feature 1..20: note = chemically synthesized
  source 1..20: mol_type = other DNA
cctcaactactggccaagaa

SEQ ID NO: 62860 - DNA, 20 bp, synthetic construct
  misc_feature 1..20: note = chemically synthesized
  source 1..20: mol_type = other DNA
ctcaactactggccaagaag

SEQ ID NO: 62861 - DNA, 20 bp, synthetic construct
  misc_feature 1..20: note = chemically synthesized
  source 1..20: mol_type = other DNA
ggccaagaaggggtgtaact

SEQ ID NO: 62862 - DNA, 20 bp, synthetic construct
  misc_feature 1..20: note = chemically synthesized
  source 1..20: mol_type = other DNA
gttttcttcttttgtgccct

SEQ ID NO: 62863 - DNA, 20 bp, synthetic construct
  misc_feature 1..20: note = chemically synthesized
  source 1..20: mol_type = other DNA
ttcttcttttgtgccctgag

SEQ ID NO: 62864 - DNA, 20 bp, synthetic construct
  misc_feature 1..20: note = chemically synthesized
  source 1..20: mol_type = other DNA
ttcttttgtgccctgagtag

SEQ ID NO: 62865 - DNA, 20 bp, synthetic construct
  misc_feature 1..20: note = chemically synthesized
  source 1..20: mol_type = other DNA
tgtgccctgagtagcagacc

SEQ ID NO: 62866 - DNA, 20 bp, synthetic construct
  misc_feature 1..20: note = chemically synthesized
  source 1..20: mol_type = other DNA
tgccctgagtagcagaccca

SEQ ID NO: 62867 - DNA, 20 bp, synthetic construct
  misc_feature 1..20: note = chemically synthesized
  source 1..20: mol_type = other DNA
tgagtagcagacccagagtc

SEQ ID NO: 62868 - DNA, 20 bp, synthetic construct
  misc_feature 1..20: note = chemically synthesized
  source 1..20: mol_type = other DNA
agtagcagacccagagtctg

SEQ ID NO: 62869 - DNA, 20 bp, synthetic construct
  misc_feature 1..20: note = chemically synthesized
  source 1..20: mol_type = other DNA
agacccagagtctggagacc

SEQ ID NO: 62870 - DNA, 20 bp, synthetic construct
  misc_feature 1..20: note = chemically synthesized
  source 1..20: mol_type = other DNA
gagtctggagacccagattc

SEQ ID NO: 62871 - DNA, 20 bp, synthetic construct
  misc_feature 1..20: note = chemically synthesized
  source 1..20: mol_type = other DNA
agtctggagacccagattct

SEQ ID NO: 62872 - DNA, 20 bp, synthetic construct
  misc_feature 1..20: note = chemically synthesized
  source 1..20: mol_type = other DNA
ggagacccagattctaggcc

SEQ ID NO: 62873 - DNA, 20 bp, synthetic construct
  misc_feature 1..20: note = chemically synthesized
  source 1..20: mol_type = other DNA
cccagattctaggcctggct

SEQ ID NO: 62874 - DNA, 20 bp, synthetic construct
  misc_feature 1..20: note = chemically synthesized
  source 1..20: mol_type = other DNA
ggcctggcttggccaacgac

SEQ ID NO: 62875 - DNA, 20 bp, synthetic construct
  misc_feature 1..20: note = chemically synthesized
  source 1..20: mol_type = other DNA
ctggcttggccaacgacaag

SEQ ID NO: 62876 - DNA, 20 bp, synthetic construct
  misc_feature 1..20: note = chemically synthesized
  source 1..20: mol_type = other DNA
tggcttggccaacgacaagc

SEQ ID NO: 62877 - DNA, 20 bp, synthetic construct
  misc_feature 1..20: note = chemically synthesized
  source 1..20: mol_type = other DNA
ggcttggccaacgacaagca

SEQ ID NO: 62878 - DNA, 20 bp, synthetic construct
  misc_feature 1..20: note = chemically synthesized
  source 1..20: mol_type = other DNA
aacgacaagcagggtgacct

SEQ ID NO: 62879 - DNA, 20 bp, synthetic construct
  misc_feature 1..20: note = chemically synthesized
  source 1..20: mol_type = other DNA
acgacaagcagggtgacctt

SEQ ID NO: 62880 - DNA, 20 bp, synthetic construct
  misc_feature 1..20: note = chemically synthesized
  source 1..20: mol_type = other DNA
ccttgggttaaaaaaaaaaa

SEQ ID NO: 62881 - DNA, 20 bp, synthetic construct
  misc_feature 1..20: note = chemically synthesized
  source 1..20: mol_type = other DNA
cttgggttaaaaaaaaaaaa

SEQ ID NO: 62882 - DNA, 20 bp, synthetic construct
  misc_feature 1..20: note = chemically synthesized
  source 1..20: mol_type = other DNA
aaaaaaaggcatcattctct

SEQ ID NO: 62883 - DNA, 20 bp, synthetic construct
  misc_feature 1..20: note = chemically synthesized
  source 1..20: mol_type = other DNA
tctcactccctcttctcaaa

SEQ ID NO: 62884 - DNA, 20 bp, synthetic construct
  misc_feature 1..20: note = chemically synthesized
  source 1..20: mol_type = other DNA
actccctcttctcaaaaaga

SEQ ID NO: 62885 - DNA, 20 bp, synthetic construct
  misc_feature 1..20: note = chemically synthesized
  source 1..20: mol_type = other DNA
gatggcaattcctcccccgc

SEQ ID NO: 62886 - DNA, 20 bp, synthetic construct
  misc_feature 1..20: note = chemically synthesized
  source 1..20: mol_type = other DNA
cctcccccgctggttttcca

SEQ ID NO: 62887 - DNA, 20 bp, synthetic construct
  misc_feature 1..20: note = chemically synthesized
  source 1..20: mol_type = other DNA
cccgctggttttccatagtt

SEQ ID NO: 62888 - DNA, 20 bp, synthetic construct
  misc_feature 1..20: note = chemically synthesized
  source 1..20: mol_type = other DNA
ccgctggttttccatagttg

SEQ ID NO: 62889 - DNA, 20 bp, synthetic construct
  misc_feature 1..20: note = chemically synthesized
  source 1..20: mol_type = other DNA
ctggttttccatagttgagg

SEQ ID NO: 62890 - DNA, 20 bp, synthetic construct
  misc_feature 1..20: note = chemically synthesized
  source 1..20: mol_type = other DNA
ttttccatagttgaggtagc

SEQ ID NO: 62891 - DNA, 20 bp, synthetic construct
  misc_feature 1..20: note = chemically synthesized
  source 1..20: mol_type = other DNA
gaggtagcaagccaatgtgt

SEQ ID NO: 62892 - DNA, 20 bp, synthetic construct
  misc_feature 1..20: note = chemically synthesized
  source 1..20: mol_type = other DNA
aggtagcaagccaatgtgtt

SEQ ID NO: 62893 - DNA, 20 bp, synthetic construct
  misc_feature 1..20: note = chemically synthesized
  source 1..20: mol_type = other DNA
ggtagcaagccaatgtgttg

SEQ ID NO: 62894 - DNA, 20 bp, synthetic construct
  misc_feature 1..20: note = chemically synthesized
  source 1..20: mol_type = other DNA
agcaagccaatgtgttgggg

SEQ ID NO: 62895 - DNA, 20 bp, synthetic construct
  misc_feature 1..20: note = chemically synthesized
  source 1..20: mol_type = other DNA
gaaaacgccctgtgcatact

SEQ ID NO: 62896 - DNA, 20 bp, synthetic construct
  misc_feature 1..20: note = chemically synthesized
  source 1..20: mol_type = other DNA
aaaacgccctgtgcatactg

SEQ ID NO: 62897 - DNA, 20 bp, synthetic construct
  misc_feature 1..20: note = chemically synthesized
  source 1..20: mol_type = other DNA
atactgaggcttatgttcca

SEQ ID NO: 62898 - DNA, 20 bp, synthetic construct
  misc_feature 1..20: note = chemically synthesized
  source 1..20: mol_type = other DNA
tactgaggcttatgttccat

SEQ ID NO: 62899 - DNA, 20 bp, synthetic construct
  misc_feature 1..20: note = chemically synthesized
  source 1..20: mol_type = other DNA
actgaggcttatgttccatg

SEQ ID NO: 62900 - DNA, 20 bp, synthetic construct
  misc_feature 1..20: note = chemically synthesized
  source 1..20: mol_type = other DNA
ctgaggcttatgttccatgg

SEQ ID NO: 62901 - DNA, 20 bp, synthetic construct
  misc_feature 1..20: note = chemically synthesized
  source 1..20: mol_type = other DNA
tgaggcttatgttccatggg

SEQ ID NO: 62902 - DNA, 20 bp, synthetic construct
  misc_feature 1..20: note = chemically synthesized
  source 1..20: mol_type = other DNA
gcttatgttccatggggggc

SEQ ID NO: 62903 - DNA, 20 bp, synthetic construct
  misc_feature 1..20: note = chemically synthesized
  source 1..20: mol_type = other DNA
cttatgttccatggggggcc

SEQ ID NO: 62904 - DNA, 20 bp, synthetic construct
  misc_feature 1..20: note = chemically synthesized
  source 1..20: mol_type = other DNA
ttatgttccatggggggcca

SEQ ID NO: 62905 - DNA, 20 bp, synthetic construct
  misc_feature 1..20: note = chemically synthesized
  source 1..20: mol_type = other DNA
tatgttccatggggggccag

SEQ ID NO: 62906 - DNA, 20 bp, synthetic construct
  misc_feature 1..20: note = chemically synthesized
  source 1..20: mol_type = other DNA
ttccatggggggccaggggc

SEQ ID NO: 62907 - DNA, 20 bp, synthetic construct
  misc_feature 1..20: note = chemically synthesized
  source 1..20: mol_type = other DNA
tccatggggggccaggggcc

SEQ ID NO: 62908 - DNA, 20 bp, synthetic construct
  misc_feature 1..20: note = chemically synthesized
  source 1..20: mol_type = other DNA
tggggggccaggggccagga

SEQ ID NO: 62909 - DNA, 20 bp, synthetic construct
  misc_feature 1..20: note = chemically synthesized
  source 1..20: mol_type = other DNA
gccaggggccaggacagtga

SEQ ID NO: 62910 - DNA, 20 bp, synthetic construct
  misc_feature 1..20: note = chemically synthesized
  source 1..20: mol_type = other DNA
ccaggggccaggacagtgat

SEQ ID NO: 62911 - DNA, 20 bp, synthetic construct
  misc_feature 1..20: note = chemically synthesized
  source 1..20: mol_type = other DNA
aggggccaggacagtgatgg

SEQ ID NO: 62912 - DNA, 20 bp, synthetic construct
  misc_feature 1..20: note = chemically synthesized
  source 1..20: mol_type = other DNA
ggggccaggacagtgatggg

SEQ ID NO: 62913 - DNA, 20 bp, synthetic construct
  misc_feature 1..20: note = chemically synthesized
  source 1..20: mol_type = other DNA
ggccaggacagtgatgggag

SEQ ID NO: 62914 - DNA, 20 bp, synthetic construct
  misc_feature 1..20: note = chemically synthesized
  source 1..20: mol_type = other DNA
ggacagtgatgggaggagac

SEQ ID NO: 62915 - DNA, 20 bp, synthetic construct
  misc_feature 1..20: note = chemically synthesized
  source 1..20: mol_type = other DNA
gacagtgatgggaggagaca

SEQ ID NO: 62916 - DNA, 20 bp, synthetic construct
  misc_feature 1..20: note = chemically synthesized
  source 1..20: mol_type = other DNA
agtgatgggaggagacaagg

SEQ ID NO: 62917 - DNA, 20 bp, synthetic construct
  misc_feature 1..20: note = chemically synthesized
  source 1..20: mol_type = other DNA
gggaggagacaaggcggata

SEQ ID NO: 62918 - DNA, 20 bp, synthetic construct
  misc_feature 1..20: note = chemically synthesized
  source 1..20: mol_type = other DNA
gaggagacaaggcggataca

SEQ ID NO: 62919 - DNA, 20 bp, synthetic construct
  misc_feature 1..20: note = chemically synthesized
  source 1..20: mol_type = other DNA
aggagacaaggcggatacag

SEQ ID NO: 62920 - DNA, 20 bp, synthetic construct
  misc_feature 1..20: note = chemically synthesized
  source 1..20: mol_type = other DNA
gagacaaggcggatacagag

SEQ ID NO: 62921 - DNA, 20 bp, synthetic construct
  misc_feature 1..20: note = chemically synthesized
  source 1..20: mol_type = other DNA
acaaggcggatacagaggag

SEQ ID NO: 62922 - DNA, 20 bp, synthetic construct
  misc_feature 1..20: note = chemically synthesized
  source 1..20: mol_type = other DNA
gaggagcagattgtcatctc

SEQ ID NO: 62923 - DNA, 20 bp, synthetic construct
  misc_feature 1..20: note = chemically synthesized
  source 1..20: mol_type = other DNA
agcagattgtcatctccagc

SEQ ID NO: 62924 - DNA, 20 bp, synthetic construct
  misc_feature 1..20: note = chemically synthesized
  source 1..20: mol_type = other DNA
gcagattgtcatctccagct

SEQ ID NO: 62925 - DNA, 20 bp, synthetic construct
  misc_feature 1..20: note = chemically synthesized
  source 1..20: mol_type = other DNA
agattgtcatctccagctgg

SEQ ID NO: 62926 - DNA, 20 bp, synthetic construct
  misc_feature 1..20: note = chemically synthesized
  source 1..20: mol_type = other DNA
gattgtcatctccagctggg

SEQ ID NO: 62927 - DNA, 20 bp, synthetic construct
  misc_feature 1..20: note = chemically synthesized
  source 1..20: mol_type = other DNA
catctccagctgggaggtga

SEQ ID NO: 62928 - DNA, 20 bp, synthetic construct
  misc_feature 1..20: note = chemically synthesized
  source 1..20: mol_type = other DNA
tggccatgcctgcacccctc

SEQ ID NO: 62929 - DNA, 20 bp, synthetic construct
  misc_feature 1..20: note = chemically synthesized
  source 1..20: mol_type = other DNA
catgcctgcacccctctggc

SEQ ID NO: 62930 - DNA, 20 bp, synthetic construct
  misc_feature 1..20: note = chemically synthesized
  source 1..20: mol_type = other DNA
gcctgcacccctctggccag

SEQ ID NO: 62931 - DNA, 20 bp, synthetic construct
  misc_feature 1..20: note = chemically synthesized
  source 1..20: mol_type = other DNA
ctgcacccctctggccagca

SEQ ID NO: 62932 - DNA, 20 bp, synthetic construct
  misc_feature 1..20: note = chemically synthesized
  source 1..20: mol_type = other DNA
tgcacccctctggccagcag

SEQ ID NO: 62933 - DNA, 20 bp, synthetic construct
  misc_feature 1..20: note = chemically synthesized
  source 1..20: mol_type = other DNA
gcacccctctggccagcaga

SEQ ID NO: 62934 - DNA, 20 bp, synthetic construct
  misc_feature 1..20: note = chemically synthesized
  source 1..20: mol_type = other DNA
cccctctggccagcagaggg

SEQ ID NO: 62935 - DNA, 20 bp, synthetic construct
  misc_feature 1..20: note = chemically synthesized
  source 1..20: mol_type = other DNA
tctggccagcagagggtggt

SEQ ID NO: 62936 - DNA, 20 bp, synthetic construct
  misc_feature 1..20: note = chemically synthesized
  source 1..20: mol_type = other DNA
ggccagcagagggtggtcag

SEQ ID NO: 62937 - DNA, 20 bp, synthetic construct
  misc_feature 1..20: note = chemically synthesized
  source 1..20: mol_type = other DNA
gccagcagagggtggtcagt

SEQ ID NO: 62938 - DNA, 20 bp, synthetic construct
  misc_feature 1..20: note = chemically synthesized
  source 1..20: mol_type = other DNA
gagggtggtcagtaggaaac

SEQ ID NO: 62939 - DNA, 20 bp, synthetic construct
  misc_feature 1..20: note = chemically synthesized
  source 1..20: mol_type = other DNA
agggtggtcagtaggaaact

SEQ ID NO: 62940 - DNA, 20 bp, synthetic construct
  misc_feature 1..20: note = chemically synthesized
  source 1..20: mol_type = other DNA
ggtggtcagtaggaaactgg

SEQ ID NO: 62941 - DNA, 20 bp, synthetic construct
  misc_feature 1..20: note = chemically synthesized
  source 1..20: mol_type = other DNA
gtggtcagtaggaaactggg

SEQ ID NO: 62942 - DNA, 20 bp, synthetic construct
  misc_feature 1..20: note = chemically synthesized
  source 1..20: mol_type = other DNA
gtaggaaactgggaggccat

SEQ ID NO: 62943 - DNA, 20 bp, synthetic construct
  misc_feature 1..20: note = chemically synthesized
  source 1..20: mol_type = other DNA
taggaaactgggaggccatt

SEQ ID NO: 62944 - DNA, 20 bp, synthetic construct
  misc_feature 1..20: note = chemically synthesized
  source 1..20: mol_type = other DNA
aggaaactgggaggccatta

SEQ ID NO: 62945 - DNA, 20 bp, synthetic construct
  misc_feature 1..20: note = chemically synthesized
  source 1..20: mol_type = other DNA
ccattagggcaaccttctat

SEQ ID NO: 62946 - DNA, 20 bp, synthetic construct
  misc_feature 1..20: note = chemically synthesized
  source 1..20: mol_type = other DNA
agggcaaccttctattggct

SEQ ID NO: 62947 - DNA, 20 bp, synthetic construct
  misc_feature 1..20: note = chemically synthesized
  source 1..20: mol_type = other DNA
accttctattggctcagact

SEQ ID NO: 62948 - DNA, 20 bp, synthetic construct
  misc_feature 1..20: note = chemically synthesized
  source 1..20: mol_type = other DNA
attggctcagactcagaatg

SEQ ID NO: 62949 - DNA, 20 bp, synthetic construct
  misc_feature 1..20: note = chemically synthesized
  source 1..20: mol_type = other DNA
ggctcagactcagaatgcag

SEQ ID NO: 62950 - DNA, 20 bp, synthetic construct
  misc_feature 1..20: note = chemically synthesized
  source 1..20: mol_type = other DNA
gcagtagaacttgtgccctg

SEQ ID NO: 62951 - DNA, 20 bp, synthetic construct
  misc_feature 1..20: note = chemically synthesized
  source 1..20: mol_type = other DNA
cttgtgccctgtagtgttca

SEQ ID NO: 62952 - DNA, 20 bp, synthetic construct
  misc_feature 1..20: note = chemically synthesized
  source 1..20: mol_type = other DNA
tgccctgtagtgttcatgga

SEQ ID NO: 62953 - DNA, 20 bp, synthetic construct
  misc_feature 1..20: note = chemically synthesized
  source 1..20: mol_type = other DNA
gccctgtagtgttcatggac

SEQ ID NO: 62954 - DNA, 20 bp, synthetic construct
  misc_feature 1..20: note = chemically synthesized
  source 1..20: mol_type = other DNA
cctgtagtgttcatggacag

SEQ ID NO: 62955 - DNA, 20 bp, synthetic construct
  misc_feature 1..20: note = chemically synthesized
  source 1..20: mol_type = other DNA
tagtgttcatggacaggagt

SEQ ID NO: 62956 - DNA, 20 bp, synthetic construct
  misc_feature 1..20: note = chemically synthesized
  source 1..20: mol_type = other DNA
gtgttcatggacaggagtga

SEQ ID NO: 62957 - DNA, 20 bp, synthetic construct
  misc_feature 1..20: note = chemically synthesized
  source 1..20: mol_type = other DNA
tgttcatggacaggagtgag

SEQ ID NO: 62958 - DNA, 20 bp, synthetic construct
  misc_feature 1..20: note = chemically synthesized
  source 1..20: mol_type = other DNA
ttcatggacaggagtgagag

SEQ ID NO: 62959 - DNA, 20 bp, synthetic construct
  misc_feature 1..20: note = chemically synthesized
  source 1..20: mol_type = other DNA
tcatggacaggagtgagagg

SEQ ID NO: 62960 - DNA, 20 bp, synthetic construct
  misc_feature 1..20: note = chemically synthesized
  source 1..20: mol_type = other DNA
ggacaggagtgagaggagga

SEQ ID NO: 62961 - DNA, 20 bp, synthetic construct
  misc_feature 1..20: note = chemically synthesized
  source 1..20: mol_type = other DNA
gacaggagtgagaggaggac

SEQ ID NO: 62962 - DNA, 20 bp, synthetic construct
  misc_feature 1..20: note = chemically synthesized
  source 1..20: mol_type = other DNA
agtgagaggaggacaggact

SEQ ID NO: 62963 - DNA, 20 bp, synthetic construct
  misc_feature 1..20: note = chemically synthesized
  source 1..20: mol_type = other DNA
gtgagaggaggacaggactg

SEQ ID NO: 62964 - DNA, 20 bp, synthetic construct
  misc_feature 1..20: note = chemically synthesized
  source 1..20: mol_type = other DNA
tgagaggaggacaggactga

SEQ ID NO: 62965 - DNA, 20 bp, synthetic construct
  misc_feature 1..20: note = chemically synthesized
  source 1..20: mol_type = other DNA
gagaggaggacaggactgag

SEQ ID NO: 62966 - DNA, 20 bp, synthetic construct
  misc_feature 1..20: note = chemically synthesized
  source 1..20: mol_type = other DNA
aggacaggactgaggggatg

SEQ ID NO: 62967 - DNA, 20 bp, synthetic construct
  misc_feature 1..20: note = chemically synthesized
  source 1..20: mol_type = other DNA
actgaggggatgtggctgtc

SEQ ID NO: 62968 - DNA, 20 bp, synthetic construct
  misc_feature 1..20: note = chemically synthesized
  source 1..20: mol_type = other DNA
ctgaggggatgtggctgtca

SEQ ID NO: 62969 - DNA, 20 bp, synthetic construct
  misc_feature 1..20: note = chemically synthesized
  source 1..20: mol_type = other DNA
tgtggctgtcaaggcctttc

SEQ ID NO: 62970 - DNA, 20 bp, synthetic construct
  misc_feature 1..20: note = chemically synthesized
  source 1..20: mol_type = other DNA
gtggctgtcaaggcctttct

SEQ ID NO: 62971 - DNA, 20 bp, synthetic construct
  misc_feature 1..20: note = chemically synthesized
  source 1..20: mol_type = other DNA
tggctgtcaaggcctttcta

SEQ ID NO: 62972 - DNA, 20 bp, synthetic construct
  misc_feature 1..20: note = chemically synthesized
  source 1..20: mol_type = other DNA
ggctgtcaaggcctttctag

SEQ ID NO: 62973 - DNA, 20 bp, synthetic construct
  misc_feature 1..20: note = chemically synthesized
  source 1..20: mol_type = other DNA
gggcgatgctgtctctccct

SEQ ID NO: 62974 - DNA, 20 bp, synthetic construct
  misc_feature 1..20: note = chemically synthesized
  source 1..20: mol_type = other DNA
atgctgtctctccctcagca

SEQ ID NO: 62975 - DNA, 20 bp, synthetic construct
  misc_feature 1..20: note = chemically synthesized
  source 1..20: mol_type = other DNA
tgctgtctctccctcagcat

SEQ ID NO: 62976 - DNA, 20 bp, synthetic construct
  misc_feature 1..20: note = chemically synthesized
  source 1..20: mol_type = other DNA
gctgtctctccctcagcata

SEQ ID NO: 62977 - DNA, 20 bp, synthetic construct
  misc_feature 1..20: note = chemically synthesized
  source 1..20: mol_type = other DNA
tgtctctccctcagcatagg

SEQ ID NO: 62978 - DNA, 20 bp, synthetic construct
  misc_feature 1..20: note = chemically synthesized
  source 1..20: mol_type = other DNA
ctctccctcagcatagggag

SEQ ID NO: 62979 - DNA, 20 bp, synthetic construct
  misc_feature 1..20: note = chemically synthesized
  source 1..20: mol_type = other DNA
tctccctcagcatagggagt

SEQ ID NO: 62980 - DNA, 20 bp, synthetic construct
  misc_feature 1..20: note = chemically synthesized
  source 1..20: mol_type = other DNA
ggagtgggcccttccacctc

SEQ ID NO: 62981 - DNA, 20 bp, synthetic construct
  misc_feature 1..20: note = chemically synthesized
  source 1..20: mol_type = other DNA
cacctctggcctctctcccc

SEQ ID NO: 62982 - DNA, 20 bp, synthetic construct
  misc_feature 1..20: note = chemically synthesized
  source 1..20: mol_type = other DNA
acctctggcctctctccccc

SEQ ID NO: 62983 - DNA, 20 bp, synthetic construct
  misc_feature 1..20: note = chemically synthesized
  source 1..20: mol_type = other DNA
cctctggcctctctccccca

SEQ ID NO: 62984 - DNA, 20 bp, synthetic construct
  misc_feature 1..20: note = chemically synthesized
  source 1..20: mol_type = other DNA
ctctcccccagggctgtgtc

SEQ ID NO: 62985 - DNA, 20 bp, synthetic construct
  misc_feature 1..20: note = chemically synthesized
  source 1..20: mol_type = other DNA
gctgtccctgataaaactgt

SEQ ID NO: 62986 - DNA, 20 bp, synthetic construct
  misc_feature 1..20: note = chemically synthesized
  source 1..20: mol_type = other DNA
tccctgataaaactgtgaga

SEQ ID NO: 62987 - DNA, 20 bp, synthetic construct
  misc_feature 1..20: note = chemically synthesized
  source 1..20: mol_type = other DNA
taaaactgtgagatggtgtg

SEQ ID NO: 62988 - DNA, 20 bp, synthetic construct
  misc_feature 1..20: note = chemically synthesized
  source 1..20: mol_type = other DNA
tgtgagatggtgtgcagtgt

SEQ ID NO: 62989 - DNA, 20 bp, synthetic construct
  misc_feature 1..20: note = chemically synthesized
  source 1..20: mol_type = other DNA
tgagatggtgtgcagtgtcg

SEQ ID NO: 62990 - DNA, 20 bp, synthetic construct
  misc_feature 1..20: note = chemically synthesized
  source 1..20: mol_type = other DNA
ggtgtgcagtgtcggagcat

SEQ ID NO: 62991 - DNA, 20 bp, synthetic construct
  misc_feature 1..20: note = chemically synthesized
  source 1..20: mol_type = other DNA
gtgtgcagtgtcggagcatg

SEQ ID NO: 62992 - DNA, 20 bp, synthetic construct
  misc_feature 1..20: note = chemically synthesized
  source 1..20: mol_type = other DNA
tgtcggagcatgaggccact

SEQ ID NO: 62993 - DNA, 20 bp, synthetic construct
  misc_feature 1..20: note = chemically synthesized
  source 1..20: mol_type = other DNA
agcatgaggccactaagtgc

SEQ ID NO: 62994 - DNA, 20 bp, synthetic construct
  misc_feature 1..20: note = chemically synthesized
  source 1..20: mol_type = other DNA
catgaggccactaagtgcca

SEQ ID NO: 62995 - DNA, 20 bp, synthetic construct
  misc_feature 1..20: note = chemically synthesized
  source 1..20: mol_type = other DNA
agtttccgcgaccatatgaa

SEQ ID NO: 62996 - DNA, 20 bp, synthetic construct
  misc_feature 1..20: note = chemically synthesized
  source 1..20: mol_type = other DNA
aaaagcgtcattccatccga

SEQ ID NO: 62997 - DNA, 20 bp, synthetic construct
  misc_feature 1..20: note = chemically synthesized
  source 1..20: mol_type = other DNA
gtcattccatccgatggtcc

SEQ ID NO: 62998 - DNA, 20 bp, synthetic construct
  misc_feature 1..20: note = chemically synthesized
  source 1..20: mol_type = other DNA
gtcccagtgttgcttgtgtg

SEQ ID NO: 62999 - DNA, 20 bp, synthetic construct
  misc_feature 1..20: note = chemically synthesized
  source 1..20: mol_type = other DNA
cagtgttgcttgtgtgaaga

SEQ ID NO: 63000 - DNA, 20 bp, synthetic construct
  misc_feature 1..20: note = chemically synthesized
  source 1..20: mol_type = other DNA
gcctcctaccttgattgcat

SEQ ID NO: 63001 - DNA, 20 bp, synthetic construct
  misc_feature 1..20: note = chemically synthesized
  source 1..20: mol_type = other DNA
cctcctaccttgattgcatc

SEQ ID NO: 63002 - DNA, 20 bp, synthetic construct
  misc_feature 1..20: note = chemically synthesized
  source 1..20: mol_type = other DNA
ctcctaccttgattgcatca

SEQ ID NO: 63003 - DNA, 20 bp, synthetic construct
  misc_feature 1..20: note = chemically synthesized
  source 1..20: mol_type = other DNA
gcaatggccctgatgcaatc

SEQ ID NO: 63004 - DNA, 20 bp, synthetic construct
  misc_feature 1..20: note = chemically synthesized
  source 1..20: mol_type = other DNA
caatggccctgatgcaatca

SEQ ID NO: 63005 - DNA, 20 bp, synthetic construct
  misc_feature 1..20: note = chemically synthesized
  source 1..20: mol_type = other DNA
tggccctgatgcaatcaagg

SEQ ID NO: 63006 - DNA, 20 bp, synthetic construct
  misc_feature 1..20: note = chemically synthesized
  source 1..20: mol_type = other DNA
ggccctgatgcaatcaaggt

SEQ ID NO: 63007 - DNA, 20 bp, synthetic construct
  misc_feature 1..20: note = chemically synthesized
  source 1..20: mol_type = other DNA
ccctgatgcaatcaaggtag

SEQ ID NO: 63008 - DNA, 20 bp, synthetic construct
  misc_feature 1..20: note = chemically synthesized
  source 1..20: mol_type = other DNA
cctgatgcaatcaaggtagg

SEQ ID NO: 63009 - DNA, 20 bp, synthetic construct
  misc_feature 1..20: note = chemically synthesized
  source 1..20: mol_type = other DNA
gtaggaggctttcttcacac

SEQ ID NO: 63010 - DNA, 20 bp, synthetic construct
  misc_feature 1..20: note = chemically synthesized
  source 1..20: mol_type = other DNA
tttcttcacacaagcaacac

SEQ ID NO: 63011 - DNA, 20 bp, synthetic construct
  misc_feature 1..20: note = chemically synthesized
  source 1..20: mol_type = other DNA
ttcttcacacaagcaacact

SEQ ID NO: 63012 - DNA, 20 bp, synthetic construct
  misc_feature 1..20: note = chemically synthesized
  source 1..20: mol_type = other DNA
acaagcaacactgggaccat

SEQ ID NO: 63013 - DNA, 20 bp, synthetic construct
  misc_feature 1..20: note = chemically synthesized
  source 1..20: mol_type = other DNA
gcaacactgggaccatcgga

SEQ ID NO: 63014 - DNA, 20 bp, synthetic construct
  misc_feature 1..20: note = chemically synthesized
  source 1..20: mol_type = other DNA
atggaatgacgcttttcata

SEQ ID NO: 63015 - DNA, 20 bp, synthetic construct
  misc_feature 1..20: note = chemically synthesized
  source 1..20: mol_type = other DNA
tgacgcttttcatatggtcg

SEQ ID NO: 63016 - DNA, 20 bp, synthetic construct
  misc_feature 1..20: note = chemically synthesized
  source 1..20: mol_type = other DNA
tcatatggtcgcggaaactc

SEQ ID NO: 63017 - DNA, 20 bp, synthetic construct
  misc_feature 1..20: note = chemically synthesized
  source 1..20: mol_type = other DNA
gtcgcggaaactctggcact

SEQ ID NO: 63018 - DNA, 20 bp, synthetic construct
  misc_feature 1..20: note = chemically synthesized
  source 1..20: mol_type = other DNA
gcggaaactctggcacttag

SEQ ID NO: 63019 - DNA, 20 bp, synthetic construct
  misc_feature 1..20: note = chemically synthesized
  source 1..20: mol_type = other DNA
cgacactgcacaccatctca

SEQ ID NO: 63020 - DNA, 20 bp, synthetic construct
  misc_feature 1..20: note = chemically synthesized
  source 1..20: mol_type = other DNA
acaccatctcacagttttat

SEQ ID NO: 63021 - DNA, 20 bp, synthetic construct
  misc_feature 1..20: note = chemically synthesized
  source 1..20: mol_type = other DNA
caccatctcacagttttatc

SEQ ID NO: 63022 - DNA, 20 bp, synthetic construct
  misc_feature 1..20: note = chemically synthesized
  source 1..20: mol_type = other DNA
accatctcacagttttatca

SEQ ID NO: 63023 - DNA, 20 bp, synthetic construct
  misc_feature 1..20: note = chemically synthesized
  source 1..20: mol_type = other DNA
tctcacagttttatcaggga

SEQ ID NO: 63024 - DNA, 20 bp, synthetic construct
  misc_feature 1..20: note = chemically synthesized
  source 1..20: mol_type = other DNA
acagttttatcagggacagc

SEQ ID NO: 63025 - DNA, 20 bp, synthetic construct
  misc_feature 1..20: note = chemically synthesized
  source 1..20: mol_type = other DNA
ttatcagggacagccagaca

SEQ ID NO: 63026 - DNA, 20 bp, synthetic construct
  misc_feature 1..20: note = chemically synthesized
  source 1..20: mol_type = other DNA
gggacagccagacacagccc

SEQ ID NO: 63027 - DNA, 20 bp, synthetic construct
  misc_feature 1..20: note = chemically synthesized
  source 1..20: mol_type = other DNA
ggacagccagacacagccct

SEQ ID NO: 63028 - DNA, 20 bp, synthetic construct
  misc_feature 1..20: note = chemically synthesized
  source 1..20: mol_type = other DNA
gacagccagacacagccctg

SEQ ID NO: 63029 - DNA, 20 bp, synthetic construct
  misc_feature 1..20: note = chemically synthesized
  source 1..20: mol_type = other DNA
acagccagacacagccctgg

SEQ ID NO: 63030 - DNA, 20 bp, synthetic construct
  misc_feature 1..20: note = chemically synthesized
  source 1..20: mol_type = other DNA
agccagacacagccctgggg

SEQ ID NO: 63031 - DNA, 20 bp, synthetic construct
  misc_feature 1..20: note = chemically synthesized
  source 1..20: mol_type = other DNA
ccagacacagccctggggga

SEQ ID NO: 63032 - DNA, 20 bp, synthetic construct
  misc_feature 1..20: note = chemically synthesized
  source 1..20: mol_type = other DNA
agacacagccctgggggaga

SEQ ID NO: 63033 - DNA, 20 bp, synthetic construct
  misc_feature 1..20: note = chemically synthesized
  source 1..20: mol_type = other DNA
gacacagccctgggggagag

SEQ ID NO: 63034 - DNA, 20 bp, synthetic construct
  misc_feature 1..20: note = chemically synthesized
  source 1..20: mol_type = other DNA
cagccctgggggagagaggc

SEQ ID NO: 63035 - DNA, 20 bp, synthetic construct
  misc_feature 1..20: note = chemically synthesized
  source 1..20: mol_type = other DNA
gccctgggggagagaggcca

SEQ ID NO: 63036 - DNA, 20 bp, synthetic construct
  misc_feature 1..20: note = chemically synthesized
  source 1..20: mol_type = other DNA
ccctgggggagagaggccag

SEQ ID NO: 63037 - DNA, 20 bp, synthetic construct
  misc_feature 1..20: note = chemically synthesized
  source 1..20: mol_type = other DNA
tgggggagagaggccagagg

SEQ ID NO: 63038 - DNA, 20 bp, synthetic construct
  misc_feature 1..20: note = chemically synthesized
  source 1..20: mol_type = other DNA
gggagagaggccagaggtgg

SEQ ID NO: 63039 - DNA, 20 bp, synthetic construct
  misc_feature 1..20: note = chemically synthesized
  source 1..20: mol_type = other DNA
ggagagaggccagaggtgga

SEQ ID NO: 63040 - DNA, 20 bp, synthetic construct
  misc_feature 1..20: note = chemically synthesized
  source 1..20: mol_type = other DNA
gagagaggccagaggtggaa

SEQ ID NO: 63041 - DNA, 20 bp, synthetic construct
  misc_feature 1..20: note = chemically synthesized
  source 1..20: mol_type = other DNA
aagggcccactccctatgct

SEQ ID NO: 63042 - DNA, 20 bp, synthetic construct
  misc_feature 1..20: note = chemically synthesized
  source 1..20: mol_type = other DNA
agggcccactccctatgctg

SEQ ID NO: 63043 - DNA, 20 bp, synthetic construct
  misc_feature 1..20: note = chemically synthesized
  source 1..20: mol_type = other DNA
gggcccactccctatgctga

SEQ ID NO: 63044 - DNA, 20 bp, synthetic construct
  misc_feature 1..20: note = chemically synthesized
  source 1..20: mol_type = other DNA
gcccactccctatgctgagg

SEQ ID NO: 63045 - DNA, 20 bp, synthetic construct
  misc_feature 1..20: note = chemically synthesized
  source 1..20: mol_type = other DNA
ccactccctatgctgaggga

SEQ ID NO: 63046 - DNA, 20 bp, synthetic construct
  misc_feature 1..20: note = chemically synthesized
  source 1..20: mol_type = other DNA
tccctatgctgagggagaga

SEQ ID NO: 63047 - DNA, 20 bp, synthetic construct
  misc_feature 1..20: note = chemically synthesized
  source 1..20: mol_type = other DNA
gggagagacagcatcgcccc

SEQ ID NO: 63048 - DNA, 20 bp, synthetic construct
  misc_feature 1..20: note = chemically synthesized
  source 1..20: mol_type = other DNA
gagacagcatcgcccctaga

SEQ ID NO: 63049 - DNA, 20 bp, synthetic construct
  misc_feature 1..20: note = chemically synthesized
  source 1..20: mol_type = other DNA
agacagcatcgcccctagaa

SEQ ID NO: 63050 - DNA, 20 bp, synthetic construct
  misc_feature 1..20: note = chemically synthesized
  source 1..20: mol_type = other DNA
cgcccctagaaaggccttga

SEQ ID NO: 63051 - DNA, 20 bp, synthetic construct
  misc_feature 1..20: note = chemically synthesized
  source 1..20: mol_type = other DNA
ccttgacagccacatcccct

SEQ ID NO: 63052 - DNA, 20 bp, synthetic construct
  misc_feature 1..20: note = chemically synthesized
  source 1..20: mol_type = other DNA
actcctgtccatgaacacta

SEQ ID NO: 63053 - DNA, 20 bp, synthetic construct
  misc_feature 1..20: note = chemically synthesized
  source 1..20: mol_type = other DNA
ctcctgtccatgaacactac

SEQ ID NO: 63054 - DNA, 20 bp, synthetic construct
  misc_feature 1..20: note = chemically synthesized
  source 1..20: mol_type = other DNA
tcctgtccatgaacactaca

SEQ ID NO: 63055 - DNA, 20 bp, synthetic construct
  misc_feature 1..20: note = chemically synthesized
  source 1..20: mol_type = other DNA
ccatgaacactacagggcac

SEQ ID NO: 63056 - DNA, 20 bp, synthetic construct
  misc_feature 1..20: note = chemically synthesized
  source 1..20: mol_type = other DNA
cacaagttctactgcattct

SEQ ID NO: 63057 - DNA, 20 bp, synthetic construct
  misc_feature 1..20: note = chemically synthesized
  source 1..20: mol_type = other DNA
ttctactgcattctgagtct

SEQ ID NO: 63058 - DNA, 20 bp, synthetic construct
  misc_feature 1..20: note = chemically synthesized
  source 1..20: mol_type = other DNA
gcattctgagtctgagccaa

SEQ ID NO: 63059 - DNA, 20 bp, synthetic construct
  misc_feature 1..20: note = chemically synthesized
  source 1..20: mol_type = other DNA
ttctgagtctgagccaatag

SEQ ID NO: 63060 - DNA, 20 bp, synthetic construct
  misc_feature 1..20: note = chemically synthesized
  source 1..20: mol_type = other DNA
tctgagtctgagccaataga

SEQ ID NO: 63061 - DNA, 20 bp, synthetic construct
  misc_feature 1..20: note = chemically synthesized
  source 1..20: mol_type = other DNA
ccaatagaaggttgccctaa

SEQ ID NO: 63062 - DNA, 20 bp, synthetic construct
  misc_feature 1..20: note = chemically synthesized
  source 1..20: mol_type = other DNA
aggttgccctaatggcctcc

SEQ ID NO: 63063 - DNA, 20 bp, synthetic construct
  misc_feature 1..20: note = chemically synthesized
  source 1..20: mol_type = other DNA
tcctactgaccaccctctgc

SEQ ID NO: 63064 - DNA, 20 bp, synthetic construct
  misc_feature 1..20: note = chemically synthesized
  source 1..20: mol_type = other DNA
actgaccaccctctgctggc

SEQ ID NO: 63065 - DNA, 20 bp, synthetic construct
  misc_feature 1..20: note = chemically synthesized
  source 1..20: mol_type = other DNA
tgaccaccctctgctggcca

SEQ ID NO: 63066 - DNA, 20 bp, synthetic construct
  misc_feature 1..20: note = chemically synthesized
  source 1..20: mol_type = other DNA
gaccaccctctgctggccag

SEQ ID NO: 63067 - DNA, 20 bp, synthetic construct
  misc_feature 1..20: note = chemically synthesized
  source 1..20: mol_type = other DNA
accaccctctgctggccaga

SEQ ID NO: 63068 - DNA, 20 bp, synthetic construct
  misc_feature 1..20: note = chemically synthesized
  source 1..20: mol_type = other DNA
ccaccctctgctggccagag

SEQ ID NO: 63069 - DNA, 20 bp, synthetic construct
  misc_feature 1..20: note = chemically synthesized
  source 1..20: mol_type = other DNA
ctctgctggccagaggggtg

SEQ ID NO: 63070 - DNA, 20 bp, synthetic construct
  misc_feature 1..20: note = chemically synthesized
  source 1..20: mol_type = other DNA
tctgctggccagaggggtgc

SEQ ID NO: 63071 - DNA, 20 bp, synthetic construct
  misc_feature 1..20: note = chemically synthesized
  source 1..20: mol_type = other DNA
tggccagaggggtgcaggca

SEQ ID NO: 63072 - DNA, 20 bp, synthetic construct
  misc_feature 1..20: note = chemically synthesized
  source 1..20: mol_type = other DNA
caggcatggccatcacctcc

SEQ ID NO: 63073 - DNA, 20 bp, synthetic construct
  misc_feature 1..20: note = chemically synthesized
  source 1..20: mol_type = other DNA
catggccatcacctcccagc

SEQ ID NO: 63074 - DNA, 20 bp, synthetic construct
  misc_feature 1..20: note = chemically synthesized
  source 1..20: mol_type = other DNA
tggccatcacctcccagctg

SEQ ID NO: 63075 - DNA, 20 bp, synthetic construct
  misc_feature 1..20: note = chemically synthesized
  source 1..20: mol_type = other DNA
gtctcctcccatcactgtcc

SEQ ID NO: 63076 - DNA, 20 bp, synthetic construct
  misc_feature 1..20: note = chemically synthesized
  source 1..20: mol_type = other DNA
cccatcactgtcctggcccc

SEQ ID NO: 63077 - DNA, 20 bp, synthetic construct
  misc_feature 1..20: note = chemically synthesized
  source 1..20: mol_type = other DNA
tcctggcccctggcccccca

SEQ ID NO: 63078 - DNA, 20 bp, synthetic construct
  misc_feature 1..20: note = chemically synthesized
  source 1..20: mol_type = other DNA
cctggccccccatggaacat

SEQ ID NO: 63079 - DNA, 20 bp, synthetic construct
  misc_feature 1..20: note = chemically synthesized
  source 1..20: mol_type = other DNA
cccccatggaacataagcct

SEQ ID NO: 63080 - DNA, 20 bp, synthetic construct
  misc_feature 1..20: note = chemically synthesized
  source 1..20: mol_type = other DNA
aacataagcctcagtatgca

SEQ ID NO: 63081 - DNA, 20 bp, synthetic construct
  misc_feature 1..20: note = chemically synthesized
  source 1..20: mol_type = other DNA
acataagcctcagtatgcac

SEQ ID NO: 63082 - DNA, 20 bp, synthetic construct
  misc_feature 1..20: note = chemically synthesized
  source 1..20: mol_type = other DNA
cataagcctcagtatgcaca

SEQ ID NO: 63083 - DNA, 20 bp, synthetic construct
  misc_feature 1..20: note = chemically synthesized
  source 1..20: mol_type = other DNA
cagtatgcacagggcgtttt

SEQ ID NO: 63084 - DNA, 20 bp, synthetic construct
  misc_feature 1..20: note = chemically synthesized
  source 1..20: mol_type = other DNA
tttcagctaccccaacacat

SEQ ID NO: 63085 - DNA, 20 bp, synthetic construct
  misc_feature 1..20: note = chemically synthesized
  source 1..20: mol_type = other DNA
ttggcttgctacctcaacta

SEQ ID NO: 63086 - DNA, 20 bp, synthetic construct
  misc_feature 1..20: note = chemically synthesized
  source 1..20: mol_type = other DNA
ctacctcaactatggaaaac

SEQ ID NO: 63087 - DNA, 20 bp, synthetic construct
  misc_feature 1..20: note = chemically synthesized
  source 1..20: mol_type = other DNA
cctcaactatggaaaaccag

SEQ ID NO: 63088 - DNA, 20 bp, synthetic construct
  misc_feature 1..20: note = chemically synthesized
  source 1..20: mol_type = other DNA
ctcaactatggaaaaccagc

SEQ ID NO: 63089 - DNA, 20 bp, synthetic construct
  misc_feature 1..20: note = chemically synthesized
  source 1..20: mol_type = other DNA
tcaactatggaaaaccagcg

SEQ ID NO: 63090 - DNA, 20 bp, synthetic construct
  misc_feature 1..20: note = chemically synthesized
  source 1..20: mol_type = other DNA
caactatggaaaaccagcgg

SEQ ID NO: 63091 - DNA, 20 bp, synthetic construct
  misc_feature 1..20: note = chemically synthesized
  source 1..20: mol_type = other DNA
actatggaaaaccagcgggg

SEQ ID NO: 63092 - DNA, 20 bp, synthetic construct
  misc_feature 1..20: note = chemically synthesized
  source 1..20: mol_type = other DNA
ctatggaaaaccagcggggg

SEQ ID NO: 63093 - DNA, 20 bp, synthetic construct
  misc_feature 1..20: note = chemically synthesized
  source 1..20: mol_type = other DNA
ggaggaattgccatcttttt

SEQ ID NO: 63094 - DNA, 20 bp, synthetic construct
  misc_feature 1..20: note = chemically synthesized
  source 1..20: mol_type = other DNA
ggaattgccatctttttgag

SEQ ID NO: 63095 - DNA, 20 bp, synthetic construct
  misc_feature 1..20: note = chemically synthesized
  source 1..20: mol_type = other DNA
aattgccatctttttgagaa

SEQ ID NO: 63096 - DNA, 20 bp, synthetic construct
  misc_feature 1..20: note = chemically synthesized
  source 1..20: mol_type = other DNA
attgccatctttttgagaag

SEQ ID NO: 63097 - DNA, 20 bp, synthetic construct
  misc_feature 1..20: note = chemically synthesized
  source 1..20: mol_type = other DNA
ttgccatctttttgagaaga

SEQ ID NO: 63098 - DNA, 20 bp, synthetic construct
  misc_feature 1..20: note = chemically synthesized
  source 1..20: mol_type = other DNA
gccatctttttgagaagagg

SEQ ID NO: 63099 - DNA, 20 bp, synthetic construct
  misc_feature 1..20: note = chemically synthesized
  source 1..20: mol_type = other DNA
tctttttgagaagagggagt

SEQ ID NO: 63100 - DNA, 20 bp, synthetic construct
  misc_feature 1..20: note = chemically synthesized
  source 1..20: mol_type = other DNA
tgagaagagggagtgagact

SEQ ID NO: 63101 - DNA, 20 bp, synthetic construct
  misc_feature 1..20: note = chemically synthesized
  source 1..20: mol_type = other DNA
agaagagggagtgagactca

SEQ ID NO: 63102 - DNA, 20 bp, synthetic construct
  misc_feature 1..20: note = chemically synthesized
  source 1..20: mol_type = other DNA
cctttttttttttttaaccc

SEQ ID NO: 63103 - DNA, 20 bp, synthetic construct
  misc_feature 1..20: note = chemically synthesized
  source 1..20: mol_type = other DNA
ctttttttttttttaaccca

SEQ ID NO: 63104 - DNA, 20 bp, synthetic construct
  misc_feature 1..20: note = chemically synthesized
  source 1..20: mol_type = other DNA
aaggtcaccctgcttgtcgt

SEQ ID NO: 63105 - DNA, 20 bp, synthetic construct
  misc_feature 1..20: note = chemically synthesized
  source 1..20: mol_type = other DNA
caccctgcttgtcgttggcc

SEQ ID NO: 63106 - DNA, 20 bp, synthetic construct
  misc_feature 1..20: note = chemically synthesized
  source 1..20: mol_type = other DNA
ctgcttgtcgttggccaagc

SEQ ID NO: 63107 - DNA, 20 bp, synthetic construct
  misc_feature 1..20: note = chemically synthesized
  source 1..20: mol_type = other DNA
tgcttgtcgttggccaagcc

SEQ ID NO: 63108 - DNA, 20 bp, synthetic construct
  misc_feature 1..20: note = chemically synthesized
  source 1..20: mol_type = other DNA
gtcgttggccaagccaggcc

SEQ ID NO: 63109 - DNA, 20 bp, synthetic construct
  misc_feature 1..20: note = chemically synthesized
  source 1..20: mol_type = other DNA
gccaagccaggcctagaatc

SEQ ID NO: 63110 - DNA, 20 bp, synthetic construct
  misc_feature 1..20: note = chemically synthesized
  source 1..20: mol_type = other DNA
ccaagccaggcctagaatct

SEQ ID NO: 63111 - DNA, 20 bp, synthetic construct
  misc_feature 1..20: note = chemically synthesized
  source 1..20: mol_type = other DNA
aggcctagaatctgggtctc

SEQ ID NO: 63112 - DNA, 20 bp, synthetic construct
  misc_feature 1..20: note = chemically synthesized
  source 1..20: mol_type = other DNA
gaatctgggtctccagactc

SEQ ID NO: 63113 - DNA, 20 bp, synthetic construct
  misc_feature 1..20: note = chemically synthesized
  source 1..20: mol_type = other DNA
aatctgggtctccagactct

SEQ ID NO: 63114 - DNA, 20 bp, synthetic construct
  misc_feature 1..20: note = chemically synthesized
  source 1..20: mol_type = other DNA
cagactctgggtctgctact

SEQ ID NO: 63115 - DNA, 20 bp, synthetic construct
  misc_feature 1..20: note = chemically synthesized
  source 1..20: mol_type = other DNA
agactctgggtctgctactc

SEQ ID NO: 63116 - DNA, 20 bp, synthetic construct
  misc_feature 1..20: note = chemically synthesized
  source 1..20: mol_type = other DNA
gactctgggtctgctactca

SEQ ID NO: 63117 - DNA, 20 bp, synthetic construct
  misc_feature 1..20: note = chemically synthesized
  source 1..20: mol_type = other DNA
gtctgctactcagggcacaa

SEQ ID NO: 63118 - DNA, 20 bp, synthetic construct
  misc_feature 1..20: note = chemically synthesized
  source 1..20: mol_type = other DNA
tgctactcagggcacaaaag

SEQ ID NO: 63119 - DNA, 20 bp, synthetic construct
  misc_feature 1..20: note = chemically synthesized
  source 1..20: mol_type = other DNA
acaaaagaagaaaacattct

SEQ ID NO: 63120 - DNA, 20 bp, synthetic construct
  misc_feature 1..20: note = chemically synthesized
  source 1..20: mol_type = other DNA
ttctgagttacaccccttct

SEQ ID NO: 63121 - DNA, 20 bp, synthetic construct
  misc_feature 1..20: note = chemically synthesized
  source 1..20: mol_type = other DNA
gagttacaccccttcttggc

SEQ ID NO: 63122 - DNA, 20 bp, synthetic construct
  misc_feature 1..20: note = chemically synthesized
  source 1..20: mol_type = other DNA
ttacaccccttcttggccag

SEQ ID NO: 63123 - DNA, 20 bp, synthetic construct
  misc_feature 1..20: note = chemically synthesized
  source 1..20: mol_type = other DNA
ccccttcttggccagtagtt

SEQ ID NO: 63124 - DNA, 20 bp, synthetic construct
  misc_feature 1..20: note = chemically synthesized
  source 1..20: mol_type = other DNA
cccttcttggccagtagttg

SEQ ID NO: 63125 - DNA, 20 bp, synthetic construct
  misc_feature 1..20: note = chemically synthesized
  source 1..20: mol_type = other DNA
ccttcttggccagtagttga

SEQ ID NO: 63126 - DNA, 20 bp, synthetic construct
  misc_feature 1..20: note = chemically synthesized
  source 1..20: mol_type = other DNA
gttgagggtaaattaacgaa

SEQ ID NO: 63127 - DNA, 20 bp, synthetic construct
  misc_feature 1..20: note = chemically synthesized
  source 1..20: mol_type = other DNA
cttgtctgttgctctctgtt

SEQ ID NO: 63128 - DNA, 20 bp, synthetic construct
  misc_feature 1..20: note = chemically synthesized
  source 1..20: mol_type = other DNA
ttgtctgttgctctctgttt

SEQ ID NO: 63129 - DNA, 20 bp, synthetic construct
  misc_feature 1..20: note = chemically synthesized
  source 1..20: mol_type = other DNA
tctgttgctctctgtttagg

SEQ ID NO: 63130 - DNA, 20 bp, synthetic construct
  misc_feature 1..20: note = chemically synthesized
  source 1..20: mol_type = other DNA
taaaaactccacaaattcaa

SEQ ID NO: 63131 - DNA, 20 bp, synthetic construct
  misc_feature 1..20: note = chemically synthesized
  source 1..20: mol_type = other DNA
tccattttcaccacactttt

SEQ ID NO: 63132 - DNA, 20 bp, synthetic construct
  misc_feature 1..20: note = chemically synthesized
  source 1..20: mol_type = other DNA
ttggctgccattcacaaaaa

SEQ ID NO: 63133 - DNA, 20 bp, synthetic construct
  misc_feature 1..20: note = chemically synthesized
  source 1..20: mol_type = other DNA
gccattcacaaaaaaagctg

SEQ ID NO: 63134 - DNA, 20 bp, synthetic construct
  misc_feature 1..20: note = chemically synthesized
  source 1..20: mol_type = other DNA
ttcacaaaaaaagctgaagc

SEQ ID NO: 63135 - DNA, 20 bp, synthetic construct
  misc_feature 1..20: note = chemically synthesized
  source 1..20: mol_type = other DNA
aaaaaagctgaagccagcca

SEQ ID NO: 63136 - DNA, 20 bp, synthetic construct
  misc_feature 1..20: note = chemically synthesized
  source 1..20: mol_type = other DNA
aaaaagctgaagccagccat

SEQ ID NO: 63137 - DNA, 20 bp, synthetic construct
  misc_feature 1..20: note = chemically synthesized
  source 1..20: mol_type = other DNA
ggtaactattaaaatccatg

SEQ ID NO: 63138 - DNA, 20 bp, synthetic construct
  misc_feature 1..20: note = chemically synthesized
  source 1..20: mol_type = other DNA
tattaaaatccatgtggttg

SEQ ID NO: 63139 - DNA, 20 bp, synthetic construct
  misc_feature 1..20: note = chemically synthesized
  source 1..20: mol_type = other DNA
ttaaaatccatgtggttgca

SEQ ID NO: 63140 - DNA, 20 bp, synthetic construct
  misc_feature 1..20: note = chemically synthesized
  source 1..20: mol_type = other DNA
aatccatgtggttgcagaga

SEQ ID NO: 63141 - DNA, 20 bp, synthetic construct
  misc_feature 1..20: note = chemically synthesized
  source 1..20: mol_type = other DNA
agacagcatccctatcacat

SEQ ID NO: 63142 - DNA, 20 bp, synthetic construct
  misc_feature 1..20: note = chemically synthesized
  source 1..20: mol_type = other DNA
tgagcttttgccctgtcccc

SEQ ID NO: 63143 - DNA, 20 bp, synthetic construct
  misc_feature 1..20: note = chemically synthesized
  source 1..20: mol_type = other DNA
gagcttttgccctgtcccca

SEQ ID NO: 63144 - DNA, 20 bp, synthetic construct
  misc_feature 1..20: note = chemically synthesized
  source 1..20: mol_type = other DNA
tctgtcatctccactccttg

SEQ ID NO: 63145 - DNA, 20 bp, synthetic construct
  misc_feature 1..20: note = chemically synthesized
  source 1..20: mol_type = other DNA
ctgtcatctccactccttgt

SEQ ID NO: 63146 - DNA, 20 bp, synthetic construct
  misc_feature 1..20: note = chemically synthesized
  source 1..20: mol_type = other DNA
ccactccttgtgggccacca

SEQ ID NO: 63147 - DNA, 20 bp, synthetic construct
  misc_feature 1..20: note = chemically synthesized
  source 1..20: mol_type = other DNA
tccttgtgggccaccacagc

SEQ ID NO: 63148 - DNA, 20 bp, synthetic construct
  misc_feature 1..20: note = chemically synthesized
  source 1..20: mol_type = other DNA
ccttgtgggccaccacagca

SEQ ID NO: 63149 - DNA, 20 bp, synthetic construct
  misc_feature 1..20: note = chemically synthesized
  source 1..20: mol_type = other DNA
ccacagcaaggctgactcac

SEQ ID NO: 63150 - DNA, 20 bp, synthetic construct
  misc_feature 1..20: note = chemically synthesized
  source 1..20: mol_type = other DNA
aggctgactcactggctctg

SEQ ID NO: 63151 - DNA, 20 bp, synthetic construct
  misc_feature 1..20: note = chemically synthesized
  source 1..20: mol_type = other DNA
ctgactcactggctctgaag

SEQ ID NO: 63152 - DNA, 20 bp, synthetic construct
  misc_feature 1..20: note = chemically synthesized
  source 1..20: mol_type = other DNA
ggctctgaagaagatccaca

SEQ ID NO: 63153 - DNA, 20 bp, synthetic construct
  misc_feature 1..20: note = chemically synthesized
  source 1..20: mol_type = other DNA
aagaagatccacaaagcctg

SEQ ID NO: 63154 - DNA, 20 bp, synthetic construct
  misc_feature 1..20: note = chemically synthesized
  source 1..20: mol_type = other DNA
gaagatccacaaagcctgtg

SEQ ID NO: 63155 - DNA, 20 bp, synthetic construct
  misc_feature 1..20: note = chemically synthesized
  source 1..20: mol_type = other DNA
agatccacaaagcctgtgga

SEQ ID NO: 63156 - DNA, 20 bp, synthetic construct
  misc_feature 1..20: note = chemically synthesized
  source 1..20: mol_type = other DNA
gatccacaaagcctgtggag

SEQ ID NO: 63157 - DNA, 20 bp, synthetic construct
  misc_feature 1..20: note = chemically synthesized
  source 1..20: mol_type = other DNA
tccacaaagcctgtggagag

SEQ ID NO: 63158 - DNA, 20 bp, synthetic construct
  misc_feature 1..20: note = chemically synthesized
  source 1..20: mol_type = other DNA
ccacaaagcctgtggagagg

SEQ ID NO: 63159 - DNA, 20 bp, synthetic construct
  misc_feature 1..20: note = chemically synthesized
  source 1..20: mol_type = other DNA
gcctgtggagaggaggccca

SEQ ID NO: 63160 - DNA, 20 bp, synthetic construct
  misc_feature 1..20: note = chemically synthesized
  source 1..20: mol_type = other DNA
agaggaggcccacagctctc

SEQ ID NO: 63161 - DNA, 20 bp, synthetic construct
  misc_feature 1..20: note = chemically synthesized
  source 1..20: mol_type = other DNA
gaggaggcccacagctctcc

SEQ ID NO: 63162 - DNA, 20 bp, synthetic construct
  misc_feature 1..20: note = chemically synthesized
  source 1..20: mol_type = other DNA
cacagctctccaggatgcat

SEQ ID NO: 63163 - DNA, 20 bp, synthetic construct
  misc_feature 1..20: note = chemically synthesized
  source 1..20: mol_type = other DNA
acagctctccaggatgcatg

SEQ ID NO: 63164 - DNA, 20 bp, synthetic construct
  misc_feature 1..20: note = chemically synthesized
  source 1..20: mol_type = other DNA
agctctccaggatgcatgag

SEQ ID NO: 63165 - DNA, 20 bp, synthetic construct
  misc_feature 1..20: note = chemically synthesized
  source 1..20: mol_type = other DNA
gctctccaggatgcatgagg

SEQ ID NO: 63166 - DNA, 20 bp, synthetic construct
  misc_feature 1..20: note = chemically synthesized
  source 1..20: mol_type = other DNA
ctctccaggatgcatgagga

SEQ ID NO: 63167 - DNA, 20 bp, synthetic construct
  misc_feature 1..20: note = chemically synthesized
  source 1..20: mol_type = other DNA
tctccaggatgcatgaggag

SEQ ID NO: 63168 - DNA, 20 bp, synthetic construct
  misc_feature 1..20: note = chemically synthesized
  source 1..20: mol_type = other DNA
gatgcatgaggaggggccac

SEQ ID NO: 63169 - DNA, 20 bp, synthetic construct
  misc_feature 1..20: note = chemically synthesized
  source 1..20: mol_type = other DNA
atgcatgaggaggggccacc

SEQ ID NO: 63170 - DNA, 20 bp, synthetic construct
  misc_feature 1..20: note = chemically synthesized
  source 1..20: mol_type = other DNA
tgcatgaggaggggccacca

SEQ ID NO: 63171 - DNA, 20 bp, synthetic construct
  misc_feature 1..20: note = chemically synthesized
  source 1..20: mol_type = other DNA
tgaggaggggccaccaggga

SEQ ID NO: 63172 - DNA, 20 bp, synthetic construct
  misc_feature 1..20: note = chemically synthesized
  source 1..20: mol_type = other DNA
gccaccagggatggccaccc

SEQ ID NO: 63173 - DNA, 20 bp, synthetic construct
  misc_feature 1..20: note = chemically synthesized
  source 1..20: mol_type = other DNA
gcgacccccattttccctct

SEQ ID NO: 63174 - DNA, 20 bp, synthetic construct
  misc_feature 1..20: note = chemically synthesized
  source 1..20: mol_type = other DNA
ccattttccctcttggccca

SEQ ID NO: 63175 - DNA, 20 bp, synthetic construct
  misc_feature 1..20: note = chemically synthesized
  source 1..20: mol_type = other DNA
cattttccctcttggcccat

SEQ ID NO: 63176 - DNA, 20 bp, synthetic construct
  misc_feature 1..20: note = chemically synthesized
  source 1..20: mol_type = other DNA
tcttggcccatgggaaatcc

SEQ ID NO: 63177 - DNA, 20 bp, synthetic construct
  misc_feature 1..20: note = chemically synthesized
  source 1..20: mol_type = other DNA
cttggcccatgggaaatcct

SEQ ID NO: 63178 - DNA, 20 bp, synthetic construct
  misc_feature 1..20: note = chemically synthesized
  source 1..20: mol_type = other DNA
tggcccatgggaaatcctag

SEQ ID NO: 63179 - DNA, 20 bp, synthetic construct
  misc_feature 1..20: note = chemically synthesized
  source 1..20: mol_type = other DNA
ggcccatgggaaatcctagg

SEQ ID NO: 63180 - DNA, 20 bp, synthetic construct
  misc_feature 1..20: note = chemically synthesized
  source 1..20: mol_type = other DNA
gaaatcctaggaggcaacat

SEQ ID NO: 63181 - DNA, 20 bp, synthetic construct
  misc_feature 1..20: note = chemically synthesized
  source 1..20: mol_type = other DNA
taggaggcaacataagcctg

SEQ ID NO: 63182 - DNA, 20 bp, synthetic construct
  misc_feature 1..20: note = chemically synthesized
  source 1..20: mol_type = other DNA
gaggcaacataagcctgtgg

SEQ ID NO: 63183 - DNA, 20 bp, synthetic construct
  misc_feature 1..20: note = chemically synthesized
  source 1..20: mol_type = other DNA
cctgtggcagcccctccaca

SEQ ID NO: 63184 - DNA, 20 bp, synthetic construct
  misc_feature 1..20: note = chemically synthesized
  source 1..20: mol_type = other DNA
cctccacaaagccctgcctc

SEQ ID NO: 63185 - DNA, 20 bp, synthetic construct
  misc_feature 1..20: note = chemically synthesized
  source 1..20: mol_type = other DNA
tccacaaagccctgcctcca

SEQ ID NO: 63186 - DNA, 20 bp, synthetic construct
  misc_feature 1..20: note = chemically synthesized
  source 1..20: mol_type = other DNA
ccctgcctccagagttccca

SEQ ID NO: 63187 - DNA, 20 bp, synthetic construct
  misc_feature 1..20: note = chemically synthesized
  source 1..20: mol_type = other DNA
cctgcctccagagttcccat

SEQ ID NO: 63188 - DNA, 20 bp, synthetic construct
  misc_feature 1..20: note = chemically synthesized
  source 1..20: mol_type = other DNA
cctccagagttcccataggc

SEQ ID NO: 63189 - DNA, 20 bp, synthetic construct
  misc_feature 1..20: note = chemically synthesized
  source 1..20: mol_type = other DNA
cataggcgagaatgtgtcct

SEQ ID NO: 63190 - DNA, 20 bp, synthetic construct
  misc_feature 1..20: note = chemically synthesized
  source 1..20: mol_type = other DNA
aggcgagaatgtgtcctcag

SEQ ID NO: 63191 - DNA, 20 bp, synthetic construct
  misc_feature 1..20: note = chemically synthesized
  source 1..20: mol_type = other DNA
gcgagaatgtgtcctcagtg

SEQ ID NO: 63192 - DNA, 20 bp, synthetic construct
  misc_feature 1..20: note = chemically synthesized
  source 1..20: mol_type = other DNA
cagtggagcattaccttgca

SEQ ID NO: 63193 - DNA, 20 bp, synthetic construct
  misc_feature 1..20: note = chemically synthesized
  source 1..20: mol_type = other DNA
attaccttgcacagcctgtg

SEQ ID NO: 63194 - DNA, 20 bp, synthetic construct
  misc_feature 1..20: note = chemically synthesized
  source 1..20: mol_type = other DNA
agcctgtgaagtgctctgtg

SEQ ID NO: 63195 - DNA, 20 bp, synthetic construct
  misc_feature 1..20: note = chemically synthesized
  source 1..20: mol_type = other DNA
gcctgtgaagtgctctgtgc

SEQ ID NO: 63196 - DNA, 20 bp, synthetic construct
  misc_feature 1..20: note = chemically synthesized
  source 1..20: mol_type = other DNA
cctgtgaagtgctctgtgcg

SEQ ID NO: 63197 - DNA, 20 bp, synthetic construct
  misc_feature 1..20: note = chemically synthesized
  source 1..20: mol_type = other DNA
aagtgctctgtgcggggata

SEQ ID NO: 63198 - DNA, 20 bp, synthetic construct
  misc_feature 1..20: note = chemically synthesized
  source 1..20: mol_type = other DNA
agtgctctgtgcggggataa

SEQ ID NO: 63199 - DNA, 20 bp, synthetic construct
  misc_feature 1..20: note = chemically synthesized
  source 1..20: mol_type = other DNA
ctctgtgcggggataaaggc

SEQ ID NO: 63200 - DNA, 20 bp, synthetic construct
  misc_feature 1..20: note = chemically synthesized
  source 1..20: mol_type = other DNA
ggggataaaggcaagtaacg

SEQ ID NO: 63201 - DNA, 20 bp, synthetic construct
  misc_feature 1..20: note = chemically synthesized
  source 1..20: mol_type = other DNA
gggataaaggcaagtaacgt

SEQ ID NO: 63202 - DNA, 20 bp, synthetic construct
  misc_feature 1..20: note = chemically synthesized
  source 1..20: mol_type = other DNA
ggataaaggcaagtaacgtg

SEQ ID NO: 63203 - DNA, 20 bp, synthetic construct
  misc_feature 1..20: note = chemically synthesized
  source 1..20: mol_type = other DNA
gtaacgtggggtcctctctc

SEQ ID NO: 63204 - DNA, 20 bp, synthetic construct
  misc_feature 1..20: note = chemically synthesized
  source 1..20: mol_type = other DNA
taacgtggggtcctctctca

SEQ ID NO: 63205 - DNA, 20 bp, synthetic construct
  misc_feature 1..20: note = chemically synthesized
  source 1..20: mol_type = other DNA
gtcctctctcaaggaattgc

SEQ ID NO: 63206 - DNA, 20 bp, synthetic construct
  misc_feature 1..20: note = chemically synthesized
  source 1..20: mol_type = other DNA
ctcaaggaattgctagctta

SEQ ID NO: 63207 - DNA, 20 bp, synthetic construct
  misc_feature 1..20: note = chemically synthesized
  source 1..20: mol_type = other DNA
tcaaggaattgctagcttat

SEQ ID NO: 63208 - DNA, 20 bp, synthetic construct
  misc_feature 1..20: note = chemically synthesized
  source 1..20: mol_type = other DNA
caaggaattgctagcttatg

SEQ ID NO: 63209 - DNA, 20 bp, synthetic construct
  misc_feature 1..20: note = chemically synthesized
  source 1..20: mol_type = other DNA
aggaattgctagcttatggg

SEQ ID NO: 63210 - DNA, 20 bp, synthetic construct
  misc_feature 1..20: note = chemically synthesized
  source 1..20: mol_type = other DNA
gaattgctagcttatgggga

SEQ ID NO: 63211 - DNA, 20 bp, synthetic construct
  misc_feature 1..20: note = chemically synthesized
  source 1..20: mol_type = other DNA
tggggagagaaaactaaacg

SEQ ID NO: 63212 - DNA, 20 bp, synthetic construct
  misc_feature 1..20: note = chemically synthesized
  source 1..20: mol_type = other DNA
ggagagaaaactaaacgtgg

SEQ ID NO: 63213 - DNA, 20 bp, synthetic construct
  misc_feature 1..20: note = chemically synthesized
  source 1..20: mol_type = other DNA
actaaacgtggaagccccaa

SEQ ID NO: 63214 - DNA, 20 bp, synthetic construct
  misc_feature 1..20: note = chemically synthesized
  source 1..20: mol_type = other DNA
tgtgacaaatgccccatgaa

SEQ ID NO: 63215 - DNA, 20 bp, synthetic construct
  misc_feature 1..20: note = chemically synthesized
  source 1..20: mol_type = other DNA
gacaaatgccccatgaatgg

SEQ ID NO: 63216 - DNA, 20 bp, synthetic construct
  misc_feature 1..20: note = chemically synthesized
  source 1..20: mol_type = other DNA
acaaatgccccatgaatggc

SEQ ID NO: 63217 - DNA, 20 bp, synthetic construct
  misc_feature 1..20: note = chemically synthesized
  source 1..20: mol_type = other DNA
aatgccccatgaatggcagg

SEQ ID NO: 63218 - DNA, 20 bp, synthetic construct
  misc_feature 1..20: note = chemically synthesized
  source 1..20: mol_type = other DNA
gccccatgaatggcaggcag

SEQ ID NO: 63219 - DNA, 20 bp, synthetic construct
  misc_feature 1..20: note = chemically synthesized
  source 1..20: mol_type = other DNA
catgaatggcaggcagaagt

SEQ ID NO: 63220 - DNA, 20 bp, synthetic construct
  misc_feature 1..20: note = chemically synthesized
  source 1..20: mol_type = other DNA
tgaatggcaggcagaagtta

SEQ ID NO: 63221 - DNA, 20 bp, synthetic construct
  misc_feature 1..20: note = chemically synthesized
  source 1..20: mol_type = other DNA
caggcagaagttagagtatg

SEQ ID NO: 63222 - DNA, 20 bp, synthetic construct
  misc_feature 1..20: note = chemically synthesized
  source 1..20: mol_type = other DNA
aggcagaagttagagtatga

SEQ ID NO: 63223 - DNA, 20 bp, synthetic construct
  misc_feature 1..20: note = chemically synthesized
  source 1..20: mol_type = other DNA
ggcagaagttagagtatgaa

SEQ ID NO: 63224 - DNA, 20 bp, synthetic construct
  misc_feature 1..20: note = chemically synthesized
  source 1..20: mol_type = other DNA
gcagaagttagagtatgaag

SEQ ID NO: 63225 - DNA, 20 bp, synthetic construct
  misc_feature 1..20: note = chemically synthesized
  source 1..20: mol_type = other DNA
cagaagttagagtatgaagg

SEQ ID NO: 63226 - DNA, 20 bp, synthetic construct
  misc_feature 1..20: note = chemically synthesized
  source 1..20: mol_type = other DNA
gtatgaagggggccccacct

SEQ ID NO: 63227 - DNA, 20 bp, synthetic construct
  misc_feature 1..20: note = chemically synthesized
  source 1..20: mol_type = other DNA
tatgaagggggccccacctc

SEQ ID NO: 63228 - DNA, 20 bp, synthetic construct
  misc_feature 1..20: note = chemically synthesized
  source 1..20: mol_type = other DNA
tgaagggggccccacctcag

SEQ ID NO: 63229 - DNA, 20 bp, synthetic construct
  misc_feature 1..20: note = chemically synthesized
  source 1..20: mol_type = other DNA
gaagggggccccacctcagg

SEQ ID NO: 63230 - DNA, 20 bp, synthetic construct
  misc_feature 1..20: note = chemically synthesized
  source 1..20: mol_type = other DNA
ggggccccacctcaggaggt

SEQ ID NO: 63231 - DNA, 20 bp, synthetic construct
  misc_feature 1..20: note = chemically synthesized
  source 1..20: mol_type = other DNA
gggccccacctcaggaggtc

SEQ ID NO: 63232 - DNA, 20 bp, synthetic construct
  misc_feature 1..20: note = chemically synthesized
  source 1..20: mol_type = other DNA
ggccccacctcaggaggtcg

SEQ ID NO: 63233 - DNA, 20 bp, synthetic construct
  misc_feature 1..20: note = chemically synthesized
  source 1..20: mol_type = other DNA
ccccacctcaggaggtcggg

SEQ ID NO: 63234 - DNA, 20 bp, synthetic construct
  misc_feature 1..20: note = chemically synthesized
  source 1..20: mol_type = other DNA
cctcaggaggtcggggagtg

SEQ ID NO: 63235 - DNA, 20 bp, synthetic construct
  misc_feature 1..20: note = chemically synthesized
  source 1..20: mol_type = other DNA
gaggtcggggagtgtggcgt

SEQ ID NO: 63236 - DNA, 20 bp, synthetic construct
  misc_feature 1..20: note = chemically synthesized
  source 1..20: mol_type = other DNA
tggcgtcagccactgcccca

SEQ ID NO: 63237 - DNA, 20 bp, synthetic construct
  misc_feature 1..20: note = chemically synthesized
  source 1..20: mol_type = other DNA
cgtcagccactgccccatag

SEQ ID NO: 63238 - DNA, 20 bp, synthetic construct
  misc_feature 1..20: note = chemically synthesized
  source 1..20: mol_type = other DNA
gtcagccactgccccatagc

SEQ ID NO: 63239 - DNA, 20 bp, synthetic construct
  misc_feature 1..20: note = chemically synthesized
  source 1..20: mol_type = other DNA
atgtgtgcaacatctgccac

SEQ ID NO: 63240 - DNA, 20 bp, synthetic construct
  misc_feature 1..20: note = chemically synthesized
  source 1..20: mol_type = other DNA
caacatctgccactggtact

SEQ ID NO: 63241 - DNA, 20 bp, synthetic construct
  misc_feature 1..20: note = chemically synthesized
  source 1..20: mol_type = other DNA
tgaccctcatttgaccctcc

SEQ ID NO: 63242 - DNA, 20 bp, synthetic construct
  misc_feature 1..20: note = chemically synthesized
  source 1..20: mol_type = other DNA
gaccctcatttgaccctccc

SEQ ID NO: 63243 - DNA, 20 bp, synthetic construct
  misc_feature 1..20: note = chemically synthesized
  source 1..20: mol_type = other DNA
ctcatttgaccctcccaggc

SEQ ID NO: 63244 - DNA, 20 bp, synthetic construct
  misc_feature 1..20: note = chemically synthesized
  source 1..20: mol_type = other DNA
tgctgtgatgaccccctccc

SEQ ID NO: 63245 - DNA, 20 bp, synthetic construct
  misc_feature 1..20: note = chemically synthesized
  source 1..20: mol_type = other DNA
gtgatgaccccctccctggt

SEQ ID NO: 63246 - DNA, 20 bp, synthetic construct
  misc_feature 1..20: note = chemically synthesized
  source 1..20: mol_type = other DNA
tgatgaccccctccctggtg

SEQ ID NO: 63247 - DNA, 20 bp, synthetic construct
  misc_feature 1..20: note = chemically synthesized
  source 1..20: mol_type = other DNA
atgaccccctccctggtgag

SEQ ID NO: 63248 - DNA, 20 bp, synthetic construct
  misc_feature 1..20: note = chemically synthesized
  source 1..20: mol_type = other DNA
ccccctccctggtgaggagc

SEQ ID NO: 63249 - DNA, 20 bp, synthetic construct
  misc_feature 1..20: note = chemically synthesized
  source 1..20: mol_type = other DNA
ctccctggtgaggagccggc

SEQ ID NO: 63250 - DNA, 20 bp, synthetic construct
  misc_feature 1..20: note = chemically synthesized
  source 1..20: mol_type = other DNA
tccctggtgaggagccggcc

SEQ ID NO: 63251 - DNA, 20 bp, synthetic construct
  misc_feature 1..20: note = chemically synthesized
  source 1..20: mol_type = other DNA
gtgaggagccggccaggact

SEQ ID NO: 63252 - DNA, 20 bp, synthetic construct
  misc_feature 1..20: note = chemically synthesized
  source 1..20: mol_type = other DNA
gccggccaggacttggatcc

SEQ ID NO: 63253 - DNA, 20 bp, synthetic construct
  misc_feature 1..20: note = chemically synthesized
  source 1..20: mol_type = other DNA
ggccaggacttggatccaag

SEQ ID NO: 63254 - DNA, 20 bp, synthetic construct
  misc_feature 1..20: note = chemically synthesized
  source 1..20: mol_type = other DNA
ggacttggatccaagaagtc

SEQ ID NO: 63255 - DNA, 20 bp, synthetic construct
  misc_feature 1..20: note = chemically synthesized
  source 1..20: mol_type = other DNA
cccatgctctgaccgctcga

SEQ ID NO: 63256 - DNA, 20 bp, synthetic construct
  misc_feature 1..20: note = chemically synthesized
  source 1..20: mol_type = other DNA
gctcgatggcaccgcttcct

SEQ ID NO: 63257 - DNA, 20 bp, synthetic construct
  misc_feature 1..20: note = chemically synthesized
  source 1..20: mol_type = other DNA
cgatggcaccgcttccttgg

SEQ ID NO: 63258 - DNA, 20 bp, synthetic construct
  misc_feature 1..20: note = chemically synthesized
  source 1..20: mol_type = other DNA
gatggcaccgcttccttggc

SEQ ID NO: 63259 - DNA, 20 bp, synthetic construct
  misc_feature 1..20: note = chemically synthesized
  source 1..20: mol_type = other DNA
cttccttggcaggacatcta

SEQ ID NO: 63260 - DNA, 20 bp, synthetic construct
  misc_feature 1..20: note = chemically synthesized
  source 1..20: mol_type = other DNA
ggcaggacatctacagctcc

SEQ ID NO: 63261 - DNA, 20 bp, synthetic construct
  misc_feature 1..20: note = chemically synthesized
  source 1..20: mol_type = other DNA
gcaggacatctacagctccc

SEQ ID NO: 63262 - DNA, 20 bp, synthetic construct
  misc_feature 1..20: note = chemically synthesized
  source 1..20: mol_type = other DNA
caggacatctacagctccca

SEQ ID NO: 63263 - DNA, 20 bp, synthetic construct
  misc_feature 1..20: note = chemically synthesized
  source 1..20: mol_type = other DNA
tctacagctcccagggcacc

SEQ ID NO: 63264 - DNA, 20 bp, synthetic construct
  misc_feature 1..20: note = chemically synthesized
  source 1..20: mol_type = other DNA
ctacagctcccagggcaccc

SEQ ID NO: 63265 - DNA, 20 bp, synthetic construct
  misc_feature 1..20: note = chemically synthesized
  source 1..20: mol_type = other DNA
tacagctcccagggcaccca

SEQ ID NO: 63266 - DNA, 20 bp, synthetic construct
  misc_feature 1..20: note = chemically synthesized
  source 1..20: mol_type = other DNA
acagctcccagggcacccag

SEQ ID NO: 63267 - DNA, 20 bp, synthetic construct
  misc_feature 1..20: note = chemically synthesized
  source 1..20: mol_type = other DNA
ccagggcacccaggggacat

SEQ ID NO: 63268 - DNA, 20 bp, synthetic construct
  misc_feature 1..20: note = chemically synthesized
  source 1..20: mol_type = other DNA
caggggacatcagcctctga

SEQ ID NO: 63269 - DNA, 20 bp, synthetic construct
  misc_feature 1..20: note = chemically synthesized
  source 1..20: mol_type = other DNA
aggggacatcagcctctgaa

SEQ ID NO: 63270 - DNA, 20 bp, synthetic construct
  misc_feature 1..20: note = chemically synthesized
  source 1..20: mol_type = other DNA
ggggacatcagcctctgaaa

SEQ ID NO: 63271 - DNA, 20 bp, synthetic construct
  misc_feature 1..20: note = chemically synthesized
  source 1..20: mol_type = other DNA
gggacatcagcctctgaaag

SEQ ID NO: 63272 - DNA, 20 bp, synthetic construct
  misc_feature 1..20: note = chemically synthesized
  source 1..20: mol_type = other DNA
atcagcctctgaaaggggaa

SEQ ID NO: 63273 - DNA, 20 bp, synthetic construct
  misc_feature 1..20: note = chemically synthesized
  source 1..20: mol_type = other DNA
gcctctgaaaggggaatggt

SEQ ID NO: 63274 - DNA, 20 bp, synthetic construct
  misc_feature 1..20: note = chemically synthesized
  source 1..20: mol_type = other DNA
gaaaggggaatggtcagacc

SEQ ID NO: 63275 - DNA, 20 bp, synthetic construct
  misc_feature 1..20: note = chemically synthesized
  source 1..20: mol_type = other DNA
aaaggggaatggtcagaccc

SEQ ID NO: 63276 - DNA, 20 bp, synthetic construct
  misc_feature 1..20: note = chemically synthesized
  source 1..20: mol_type = other DNA
aggggaatggtcagacccgg

SEQ ID NO: 63277 - DNA, 20 bp, synthetic construct
  misc_feature 1..20: note = chemically synthesized
  source 1..20: mol_type = other DNA
ggggaatggtcagacccggg

SEQ ID NO: 63278 - DNA, 20 bp, synthetic construct
  misc_feature 1..20: note = chemically synthesized
  source 1..20: mol_type = other DNA
gaggccttgaatgccatgct

SEQ ID NO: 63279 - DNA, 20 bp, synthetic construct
  misc_feature 1..20: note = chemically synthesized
  source 1..20: mol_type = other DNA
aggccttgaatgccatgcta

SEQ ID NO: 63280 - DNA, 20 bp, synthetic construct
  misc_feature 1..20: note = chemically synthesized
  source 1..20: mol_type = other DNA
gccttgaatgccatgctaag

SEQ ID NO: 63281 - DNA, 20 bp, synthetic construct
  misc_feature 1..20: note = chemically synthesized
  source 1..20: mol_type = other DNA
gaatgccatgctaaggagtt

SEQ ID NO: 63282 - DNA, 20 bp, synthetic construct
  misc_feature 1..20: note = chemically synthesized
  source 1..20: mol_type = other DNA
ctaaggagttcggacttgac

SEQ ID NO: 63283 - DNA, 20 bp, synthetic construct
  misc_feature 1..20: note = chemically synthesized
  source 1..20: mol_type = other DNA
aaggagttcggacttgacaa

SEQ ID NO: 63284 - DNA, 20 bp, synthetic construct
  misc_feature 1..20: note = chemically synthesized
  source 1..20: mol_type = other DNA
aggagttcggacttgacaag

SEQ ID NO: 63285 - DNA, 20 bp, synthetic construct
  misc_feature 1..20: note = chemically synthesized
  source 1..20: mol_type = other DNA
agttcggacttgacaagagg

SEQ ID NO: 63286 - DNA, 20 bp, synthetic construct
  misc_feature 1..20: note = chemically synthesized
  source 1..20: mol_type = other DNA
tcggacttgacaagaggcag

SEQ ID NO: 63287 - DNA, 20 bp, synthetic construct
  misc_feature 1..20: note = chemically synthesized
  source 1..20: mol_type = other DNA
cttgacaagaggcagcagca

SEQ ID NO: 63288 - DNA, 20 bp, synthetic construct
  misc_feature 1..20: note = chemically synthesized
  source 1..20: mol_type = other DNA
ttgacaagaggcagcagcaa

SEQ ID NO: 63289 - DNA, 20 bp, synthetic construct
  misc_feature 1..20: note = chemically synthesized
  source 1..20: mol_type = other DNA
tgacaagaggcagcagcaaa

SEQ ID NO: 63290 - DNA, 20 bp, synthetic construct
  misc_feature 1..20: note = chemically synthesized
  source 1..20: mol_type = other DNA
agcaaagggttttgataacc

SEQ ID NO: 63291 - DNA, 20 bp, synthetic construct
  misc_feature 1..20: note = chemically synthesized
  source 1..20: mol_type = other DNA
aagggttttgataacctggt

SEQ ID NO: 63292 - DNA, 20 bp, synthetic construct
  misc_feature 1..20: note = chemically synthesized
  source 1..20: mol_type = other DNA
ttattgtatttcactgctgc

SEQ ID NO: 63293 - DNA, 20 bp, synthetic construct
  misc_feature 1..20: note = chemically synthesized
  source 1..20: mol_type = other DNA
ttcactgctgcaagatttac

SEQ ID NO: 63294 - DNA, 20 bp, synthetic construct
  misc_feature 1..20: note = chemically synthesized
  source 1..20: mol_type = other DNA
gctgcaagatttactggaca

SEQ ID NO: 63295 - DNA, 20 bp, synthetic construct
  misc_feature 1..20: note = chemically synthesized
  source 1..20: mol_type = other DNA
tgcaagatttactggacaaa

SEQ ID NO: 63296 - DNA, 20 bp, synthetic construct
  misc_feature 1..20: note = chemically synthesized
  source 1..20: mol_type = other DNA
gcaagatttactggacaaag

SEQ ID NO: 63297 - DNA, 20 bp, synthetic construct
  misc_feature 1..20: note = chemically synthesized
  source 1..20: mol_type = other DNA
aagatttactggacaaagag

SEQ ID NO: 63298 - DNA, 20 bp, synthetic construct
  misc_feature 1..20: note = chemically synthesized
  source 1..20: mol_type = other DNA
agatttactggacaaagagg

SEQ ID NO: 63299 - DNA, 20 bp, synthetic construct
  misc_feature 1..20: note = chemically synthesized
  source 1..20: mol_type = other DNA
atttactggacaaagaggag

SEQ ID NO: 63300 - DNA, 20 bp, synthetic construct
  misc_feature 1..20: note = chemically synthesized
  source 1..20: mol_type = other DNA
tttactggacaaagaggagg

SEQ ID NO: 63301 - DNA, 20 bp, synthetic construct
  misc_feature 1..20: note = chemically synthesized
  source 1..20: mol_type = other DNA
ttactggacaaagaggagga

SEQ ID NO: 63302 - DNA, 20 bp, synthetic construct
  misc_feature 1..20: note = chemically synthesized
  source 1..20: mol_type = other DNA
tactggacaaagaggaggag

SEQ ID NO: 63303 - DNA, 20 bp, synthetic construct
  misc_feature 1..20: note = chemically synthesized
  source 1..20: mol_type = other DNA
actggacaaagaggaggagg

SEQ ID NO: 63304 - DNA, 20 bp, synthetic construct
  misc_feature 1..20: note = chemically synthesized
  source 1..20: mol_type = other DNA
tggacaaagaggaggagggg

SEQ ID NO: 63305 - DNA, 20 bp, synthetic construct
  misc_feature 1..20: note = chemically synthesized
  source 1..20: mol_type = other DNA
acaaagaggaggagggggag

SEQ ID NO: 63306 - DNA, 20 bp, synthetic construct
  misc_feature 1..20: note = chemically synthesized
  source 1..20: mol_type = other DNA
agaggaggagggggagaaga

SEQ ID NO: 63307 - DNA, 20 bp, synthetic construct
  misc_feature 1..20: note = chemically synthesized
  source 1..20: mol_type = other DNA
gaggagggggagaagacagt

SEQ ID NO: 63308 - DNA, 20 bp, synthetic construct
  misc_feature 1..20: note = chemically synthesized
  source 1..20: mol_type = other DNA
gggggagaagacagtgagtg

SEQ ID NO: 63309 - DNA, 20 bp, synthetic construct
  misc_feature 1..20: note = chemically synthesized
  source 1..20: mol_type = other DNA
gaagacagtgagtgcagtga

SEQ ID NO: 63310 - DNA, 20 bp, synthetic construct
  misc_feature 1..20: note = chemically synthesized
  source 1..20: mol_type = other DNA
aagacagtgagtgcagtgaa

SEQ ID NO: 63311 - DNA, 20 bp, synthetic construct
  misc_feature 1..20: note = chemically synthesized
  source 1..20: mol_type = other DNA
tgagtgcagtgaaaggtgtc

SEQ ID NO: 63312 - DNA, 20 bp, synthetic construct
  misc_feature 1..20: note = chemically synthesized
  source 1..20: mol_type = other DNA
gtgcagtgaaaggtgtctag

SEQ ID NO: 63313 - DNA, 20 bp, synthetic construct
  misc_feature 1..20: note = chemically synthesized
  source 1..20: mol_type = other DNA
tgaaaggtgtctagaagccc

SEQ ID NO: 63314 - DNA, 20 bp, synthetic construct
  misc_feature 1..20: note = chemically synthesized
  source 1..20: mol_type = other DNA
ggtgtctagaagcccaagca

SEQ ID NO: 63315 - DNA, 20 bp, synthetic construct
  misc_feature 1..20: note = chemically synthesized
  source 1..20: mol_type = other DNA
gtgtctagaagcccaagcaa

SEQ ID NO: 63316 - DNA, 20 bp, synthetic construct
  misc_feature 1..20: note = chemically synthesized
  source 1..20: mol_type = other DNA
ctagaagcccaagcaaaggc

SEQ ID NO: 63317 - DNA, 20 bp, synthetic construct
  misc_feature 1..20: note = chemically synthesized
  source 1..20: mol_type = other DNA
tagaagcccaagcaaaggcc

SEQ ID NO: 63318 - DNA, 20 bp, synthetic construct
  misc_feature 1..20: note = chemically synthesized
  source 1..20: mol_type = other DNA
agaagcccaagcaaaggcca

SEQ ID NO: 63319 - DNA, 20 bp, synthetic construct
  misc_feature 1..20: note = chemically synthesized
  source 1..20: mol_type = other DNA
gaagcccaagcaaaggccag

SEQ ID NO: 63320 - DNA, 20 bp, synthetic construct
  misc_feature 1..20: note = chemically synthesized
  source 1..20: mol_type = other DNA
gcccaagcaaaggccagggg

SEQ ID NO: 63321 - DNA, 20 bp, synthetic construct
  misc_feature 1..20: note = chemically synthesized
  source 1..20: mol_type = other DNA
cccaagcaaaggccaggggt

SEQ ID NO: 63322 - DNA, 20 bp, synthetic construct
  misc_feature 1..20: note = chemically synthesized
  source 1..20: mol_type = other DNA
ccaagcaaaggccaggggtg

SEQ ID NO: 63323 - DNA, 20 bp, synthetic construct
  misc_feature 1..20: note = chemically synthesized
  source 1..20: mol_type = other DNA
caaaggccaggggtggggcg

SEQ ID NO: 63324 - DNA, 20 bp, synthetic construct
  misc_feature 1..20: note = chemically synthesized
  source 1..20: mol_type = other DNA
aaggccaggggtggggcgta

SEQ ID NO: 63325 - DNA, 20 bp, synthetic construct
  misc_feature 1..20: note = chemically synthesized
  source 1..20: mol_type = other DNA
ggccaggggtggggcgtaga

SEQ ID NO: 63326 - DNA, 20 bp, synthetic construct
  misc_feature 1..20: note = chemically synthesized
  source 1..20: mol_type = other DNA
gccaggggtggggcgtagag

SEQ ID NO: 63327 - DNA, 20 bp, synthetic construct
  misc_feature 1..20: note = chemically synthesized
  source 1..20: mol_type = other DNA
ggtggggcgtagagaggcaa

SEQ ID NO: 63328 - DNA, 20 bp, synthetic construct
  misc_feature 1..20: note = chemically synthesized
  source 1..20: mol_type = other DNA
gggcgtagagaggcaatgga

SEQ ID NO: 63329 - DNA, 20 bp, synthetic construct
  misc_feature 1..20: note = chemically synthesized
  source 1..20: mol_type = other DNA
ggcgtagagaggcaatggaa

SEQ ID NO: 63330 - DNA, 20 bp, synthetic construct
  misc_feature 1..20: note = chemically synthesized
  source 1..20: mol_type = other DNA
agaggcaatggaaaggcacc

SEQ ID NO: 63331 - DNA, 20 bp, synthetic construct
  misc_feature 1..20: note = chemically synthesized
  source 1..20: mol_type = other DNA
tggaaaggcacccagacacc

SEQ ID NO: 63332 - DNA, 20 bp, synthetic construct
  misc_feature 1..20: note = chemically synthesized
  source 1..20: mol_type = other DNA
ggaaaggcacccagacaccc

SEQ ID NO: 63333 - DNA, 20 bp, synthetic construct
  misc_feature 1..20: note = chemically synthesized
  source 1..20: mol_type = other DNA
cacccagacacccaggcttc

SEQ ID NO: 63334 - DNA, 20 bp, synthetic construct
  misc_feature 1..20: note = chemically synthesized
  source 1..20: mol_type = other DNA
gacacccaggcttccagcct

SEQ ID NO: 63335 - DNA, 20 bp, synthetic construct
  misc_feature 1..20: note = chemically synthesized
  source 1..20: mol_type = other DNA
ccaggcttccagcctgagcg

SEQ ID NO: 63336 - DNA, 20 bp, synthetic construct
  misc_feature 1..20: note = chemically synthesized
  source 1..20: mol_type = other DNA
aggcttccagcctgagcgcg

SEQ ID NO: 63337 - DNA, 20 bp, synthetic construct
  misc_feature 1..20: note = chemically synthesized
  source 1..20: mol_type = other DNA
gcctgagcgcggagtgcatg

SEQ ID NO: 63338 - DNA, 20 bp, synthetic construct
  misc_feature 1..20: note = chemically synthesized
  source 1..20: mol_type = other DNA
cctgagcgcggagtgcatgc

SEQ ID NO: 63339 - DNA, 20 bp, synthetic construct
  misc_feature 1..20: note = chemically synthesized
  source 1..20: mol_type = other DNA
cggagtgcatgcaggctgcg

SEQ ID NO: 63340 - DNA, 20 bp, synthetic construct
  misc_feature 1..20: note = chemically synthesized
  source 1..20: mol_type = other DNA
agtgcatgcaggctgcgcgg

SEQ ID NO: 63341 - DNA, 20 bp, synthetic construct
  misc_feature 1..20: note = chemically synthesized
  source 1..20: mol_type = other DNA
caggctgcgcggtggccgcc

SEQ ID NO: 63342 - DNA, 20 bp, synthetic construct
  misc_feature 1..20: note = chemically synthesized
  source 1..20: mol_type = other DNA
aggctgcgcggtggccgccc

SEQ ID NO: 63343 - DNA, 20 bp, synthetic construct
  misc_feature 1..20: note = chemically synthesized
  source 1..20: mol_type = other DNA
cgcggtggccgcccgggttg

SEQ ID NO: 63344 - DNA, 20 bp, synthetic construct
  misc_feature 1..20: note = chemically synthesized
  source 1..20: mol_type = other DNA
gcggtggccgcccgggttgc

SEQ ID NO: 63345 - DNA, 20 bp, synthetic construct
  misc_feature 1..20: note = chemically synthesized
  source 1..20: mol_type = other DNA
cggtggccgcccgggttgca

SEQ ID NO: 63346 - DNA, 20 bp, synthetic construct
  misc_feature 1..20: note = chemically synthesized
  source 1..20: mol_type = other DNA
cccgggttgcagggaacgcg

SEQ ID NO: 63347 - DNA, 20 bp, synthetic construct
  misc_feature 1..20: note = chemically synthesized
  source 1..20: mol_type = other DNA
ccgggttgcagggaacgcgc

SEQ ID NO: 63348 - DNA, 20 bp, synthetic construct
  misc_feature 1..20: note = chemically synthesized
  source 1..20: mol_type = other DNA
gttgcagggaacgcgcgggc

SEQ ID NO: 63349 - DNA, 20 bp, synthetic construct
  misc_feature 1..20: note = chemically synthesized
  source 1..20: mol_type = other DNA
cgcgcgggccagcgactctg

SEQ ID NO: 63350 - DNA, 20 bp, synthetic construct
  misc_feature 1..20: note = chemically synthesized
  source 1..20: mol_type = other DNA
accccgtgcccgcactcacc

SEQ ID NO: 63351 - DNA, 20 bp, synthetic construct
  misc_feature 1..20: note = chemically synthesized
  source 1..20: mol_type = other DNA
ccccgtgcccgcactcaccc

SEQ ID NO: 63352 - DNA, 20 bp, synthetic construct
  misc_feature 1..20: note = chemically synthesized
  source 1..20: mol_type = other DNA
gtgcccgcactcacccagga

SEQ ID NO: 63353 - DNA, 20 bp, synthetic construct
  misc_feature 1..20: note = chemically synthesized
  source 1..20: mol_type = other DNA
cgcactcacccaggacggcg

SEQ ID NO: 63354 - DNA, 20 bp, synthetic construct
  misc_feature 1..20: note = chemically synthesized
  source 1..20: mol_type = other DNA
tcacccaggacggcgcagac

SEQ ID NO: 63355 - DNA, 20 bp, synthetic construct
  misc_feature 1..20: note = chemically synthesized
  source 1..20: mol_type = other DNA
cccaggacggcgcagaccag

SEQ ID NO: 63356 - DNA, 20 bp, synthetic construct
  misc_feature 1..20: note = chemically synthesized
  source 1..20: mol_type = other DNA
ccaggacggcgcagaccagc

SEQ ID NO: 63357 - DNA, 20 bp, synthetic construct
  misc_feature 1..20: note = chemically synthesized
  source 1..20: mol_type = other DNA
caggacggcgcagaccagca

SEQ ID NO: 63358 - DNA, 20 bp, synthetic construct
  misc_feature 1..20: note = chemically synthesized
  source 1..20: mol_type = other DNA
gcagaccagcagggctccca

SEQ ID NO: 63359 - DNA, 20 bp, synthetic construct
  misc_feature 1..20: note = chemically synthesized
  source 1..20: mol_type = other DNA
accagcagggctcccacggc

SEQ ID NO: 63360 - DNA, 20 bp, synthetic construct
  misc_feature 1..20: note = chemically synthesized
  source 1..20: mol_type = other DNA
ccacggcgagcctcatcttc

SEQ ID NO: 63361 - DNA, 20 bp, synthetic construct
  misc_feature 1..20: note = chemically synthesized
  source 1..20: mol_type = other DNA
cacggcgagcctcatcttcc

SEQ ID NO: 63362 - DNA, 20 bp, synthetic construct
  misc_feature 1..20: note = chemically synthesized
  source 1..20: mol_type = other DNA
cgagcctcatcttccgggtg

SEQ ID NO: 63363 - DNA, 20 bp, synthetic construct
  misc_feature 1..20: note = chemically synthesized
  source 1..20: mol_type = other DNA
catcttccgggtgcggcgct

SEQ ID NO: 63364 - DNA, 20 bp, synthetic construct
  misc_feature 1..20: note = chemically synthesized
  source 1..20: mol_type = other DNA
cttccgggtgcggcgctgag

SEQ ID NO: 63365 - DNA, 20 bp, synthetic construct
  misc_feature 1..20: note = chemically synthesized
  source 1..20: mol_type = other DNA
cgggtgcggcgctgagcagc

SEQ ID NO: 63366 - DNA, 20 bp, synthetic construct
  misc_feature 1..20: note = chemically synthesized
  source 1..20: mol_type = other DNA
gcggcgctgagcagcgagca

SEQ ID NO: 63367 - DNA, 20 bp, synthetic construct
  misc_feature 1..20: note = chemically synthesized
  source 1..20: mol_type = other DNA
cgctgagcagcgagcacagt

SEQ ID NO: 63368 - DNA, 20 bp, synthetic construct
  misc_feature 1..20: note = chemically synthesized
  source 1..20: mol_type = other DNA
cagtcggactcgcttctgtg

SEQ ID NO: 63369 - DNA, 20 bp, synthetic construct
  misc_feature 1..20: note = chemically synthesized
  source 1..20: mol_type = other DNA
actcgcttctgtgcagcctc

SEQ ID NO: 63370 - DNA, 20 bp, synthetic construct
  misc_feature 1..20: note = chemically synthesized
  source 1..20: mol_type = other DNA
gcgtccctttattccattcc

SEQ ID NO: 63371 - DNA, 20 bp, synthetic construct
  misc_feature 1..20: note = chemically synthesized
  source 1..20: mol_type = other DNA
cctttattccattcccggcc

SEQ ID NO: 63372 - DNA, 20 bp, synthetic construct
  misc_feature 1..20: note = chemically synthesized
  source 1..20: mol_type = other DNA
ctttattccattcccggcct

SEQ ID NO: 63373 - DNA, 20 bp, synthetic construct
  misc_feature 1..20: note = chemically synthesized
  source 1..20: mol_type = other DNA
tattccattcccggcctggg

SEQ ID NO: 63374 - DNA, 20 bp, synthetic construct
  misc_feature 1..20: note = chemically synthesized
  source 1..20: mol_type = other DNA
attccattcccggcctgggc

SEQ ID NO: 63375 - DNA, 20 bp, synthetic construct
  misc_feature 1..20: note = chemically synthesized
  source 1..20: mol_type = other DNA
cattcccggcctgggcgggc

SEQ ID NO: 63376 - DNA, 20 bp, synthetic construct
  misc_feature 1..20: note = chemically synthesized
  source 1..20: mol_type = other DNA
attcccggcctgggcgggct

SEQ ID NO: 63377 - DNA, 20 bp, synthetic construct
  misc_feature 1..20: note = chemically synthesized
  source 1..20: mol_type = other DNA
tttgacctcccgtgtttgtg

SEQ ID NO: 63378 - DNA, 20 bp, synthetic construct
  misc_feature 1..20: note = chemically synthesized
  source 1..20: mol_type = other DNA
acctcccgtgtttgtgcagc

SEQ ID NO: 63379 - DNA, 20 bp, synthetic construct
  misc_feature 1..20: note = chemically synthesized
  source 1..20: mol_type = other DNA
cctcccgtgtttgtgcagcc

SEQ ID NO: 63380 - DNA, 20 bp, synthetic construct
  misc_feature 1..20: note = chemically synthesized
  source 1..20: mol_type = other DNA
cactgatcacctcattttct

SEQ ID NO: 63381 - DNA, 20 bp, synthetic construct
  misc_feature 1..20: note = chemically synthesized
  source 1..20: mol_type = other DNA
tcacctcattttctgagctc

SEQ ID NO: 63382 - DNA, 20 bp, synthetic construct
  misc_feature 1..20: note = chemically synthesized
  source 1..20: mol_type = other DNA
acctcattttctgagctctg

SEQ ID NO: 63383 - DNA, 20 bp, synthetic construct
  misc_feature 1..20: note = chemically synthesized
  source 1..20: mol_type = other DNA
gagctctggagacgacccgc

SEQ ID NO: 63384 - DNA, 20 bp, synthetic construct
  misc_feature 1..20: note = chemically synthesized
  source 1..20: mol_type = other DNA
ctctggagacgacccgcgag

SEQ ID NO: 63385 - DNA, 20 bp, synthetic construct
  misc_feature 1..20: note = chemically synthesized
  source 1..20: mol_type = other DNA
tggagacgacccgcgagtgg

SEQ ID NO: 63386 - DNA, 20 bp, synthetic construct
  misc_feature 1..20: note = chemically synthesized
  source 1..20: mol_type = other DNA
ggagacgacccgcgagtgga

SEQ ID NO: 63387 - DNA, 20 bp, synthetic construct
  misc_feature 1..20: note = chemically synthesized
  source 1..20: mol_type = other DNA
agacgacccgcgagtggaag

SEQ ID NO: 63388 - DNA, 20 bp, synthetic construct
  misc_feature 1..20: note = chemically synthesized
  source 1..20: mol_type = other DNA
acccgcgagtggaaggagtc

SEQ ID NO: 63389 - DNA, 20 bp, synthetic construct
  misc_feature 1..20: note = chemically synthesized
  source 1..20: mol_type = other DNA
cgagtggaaggagtccagca

SEQ ID NO: 63390 - DNA, 20 bp, synthetic construct
  misc_feature 1..20: note = chemically synthesized
  source 1..20: mol_type = other DNA
gtccagcacagaaatgttga

SEQ ID NO: 63391 - DNA, 20 bp, synthetic construct
  misc_feature 1..20: note = chemically synthesized
  source 1..20: mol_type = other DNA
tccagcacagaaatgttgat

SEQ ID NO: 63392 - DNA, 20 bp, synthetic construct
  misc_feature 1..20: note = chemically synthesized
  source 1..20: mol_type = other DNA
agcacagaaatgttgatggg

SEQ ID NO: 63393 - DNA, 20 bp, synthetic construct
  misc_feature 1..20: note = chemically synthesized
  source 1..20: mol_type = other DNA
gcacagaaatgttgatggga

SEQ ID NO: 63394 - DNA, 20 bp, synthetic construct
  misc_feature 1..20: note = chemically synthesized
  source 1..20: mol_type = other DNA
cacagaaatgttgatgggaa

SEQ ID NO: 63395 - DNA, 20 bp, synthetic construct
  misc_feature 1..20: note = chemically synthesized
  source 1..20: mol_type = other DNA
tgttgatgggaagggacatg

SEQ ID NO: 63396 - DNA, 20 bp, synthetic construct
  misc_feature 1..20: note = chemically synthesized
  source 1..20: mol_type = other DNA
aagggacatgaagcacaatg

SEQ ID NO: 63397 - DNA, 20 bp, synthetic construct
  misc_feature 1..20: note = chemically synthesized
  source 1..20: mol_type = other DNA
caatgcagccattgtcatcg

SEQ ID NO: 63398 - DNA, 20 bp, synthetic construct
  misc_feature 1..20: note = chemically synthesized
  source 1..20: mol_type = other DNA
cattgtcatcgcggctcgct

SEQ ID NO: 63399 - DNA, 20 bp, synthetic construct
  misc_feature 1..20: note = chemically synthesized
  source 1..20: mol_type = other DNA
gtgctggactccttccactc

SEQ ID NO: 63400 - DNA, 20 bp, synthetic construct
  misc_feature 1..20: note = chemically synthesized
  source 1..20: mol_type = other DNA
aaaatgaggtgatcagtggg

SEQ ID NO: 63401 - DNA, 20 bp, synthetic construct
  misc_feature 1..20: note = chemically synthesized
  source 1..20: mol_type = other DNA
cagtgggacgagtaaggaag

SEQ ID NO: 63402 - DNA, 20 bp, synthetic construct
  misc_feature 1..20: note = chemically synthesized
  source 1..20: mol_type = other DNA
gcgcccagcccgcccaggcc

SEQ ID NO: 63403 - DNA, 20 bp, synthetic construct
  misc_feature 1..20: note = chemically synthesized
  source 1..20: mol_type = other DNA
cagcccgcccaggccgggaa

SEQ ID NO: 63404 - DNA, 20 bp, synthetic construct
  misc_feature 1..20: note = chemically synthesized
  source 1..20: mol_type = other DNA
gcgccggaggctgcacagaa

SEQ ID NO: 63405 - DNA, 20 bp, synthetic construct
  misc_feature 1..20: note = chemically synthesized
  source 1..20: mol_type = other DNA
ccctgctggtctgcgccgtc

SEQ ID NO: 63406 - DNA, 20 bp, synthetic construct
  misc_feature 1..20: note = chemically synthesized
  source 1..20: mol_type = other DNA
gctggtctgcgccgtcctgg

SEQ ID NO: 63407 - DNA, 20 bp, synthetic construct
  misc_feature 1..20: note = chemically synthesized
  source 1..20: mol_type = other DNA
gtcctgggtgagtgcgggca

SEQ ID NO: 63408 - DNA, 20 bp, synthetic construct
  misc_feature 1..20: note = chemically synthesized
  source 1..20: mol_type = other DNA
gcgggcacggggtagcaccg

SEQ ID NO: 63409 - DNA, 20 bp, synthetic construct
  misc_feature 1..20: note = chemically synthesized
  source 1..20: mol_type = other DNA
tccgcgctcaggctggaagc

SEQ ID NO: 63410 - DNA, 20 bp, synthetic construct
  misc_feature 1..20: note = chemically synthesized
  source 1..20: mol_type = other DNA
caggctggaagcctgggtgt

SEQ ID NO: 63411 - DNA, 20 bp, synthetic construct
  misc_feature 1..20: note = chemically synthesized
  source 1..20: mol_type = other DNA
agcatggcattcaaggcctc

SEQ ID NO: 63412 - DNA, 20 bp, synthetic construct
  misc_feature 1..20: note = chemically synthesized
  source 1..20: mol_type = other DNA
ctttcagaggctgatgtccc

SEQ ID NO: 63413 - DNA, 20 bp, synthetic construct
  misc_feature 1..20: note = chemically synthesized
  source 1..20: mol_type = other DNA
gccatcgagcggtcagagca

SEQ ID NO: 63414 - DNA, 20 bp, synthetic construct
  misc_feature 1..20: note = chemically synthesized
  source 1..20: mol_type = other DNA
ggggtttgaagccagacttc

SEQ ID NO: 63415 - DNA, 20 bp, synthetic construct
  misc_feature 1..20: note = chemically synthesized
  source 1..20: mol_type = other DNA
ggccggctcctcaccaggga

SEQ ID NO: 63416 - DNA, 20 bp, synthetic construct
  misc_feature 1..20: note = chemically synthesized
  source 1..20: mol_type = other DNA
tcatcacagcacttgcctgg

SEQ ID NO: 63417 - DNA, 20 bp, synthetic construct
  misc_feature 1..20: note = chemically synthesized
  source 1..20: mol_type = other DNA
cttgcctgggagggtcaaat

SEQ ID NO: 63418 - DNA, 20 bp, synthetic construct
  misc_feature 1..20: note = chemically synthesized
  source 1..20: mol_type = other DNA
ggtcagcgaggtggcagatg

SEQ ID NO: 63419 - DNA, 20 bp, synthetic construct
  misc_feature 1..20: note = chemically synthesized
  source 1..20: mol_type = other DNA
cacaggcttatgttgcctcc

SEQ ID NO: 63420 - DNA, 20 bp, synthetic construct
  misc_feature 1..20: note = chemically synthesized
  source 1..20: mol_type = other DNA
catgggccaagagggaaaat

SEQ ID NO: 63421 - DNA, 20 bp, synthetic construct
  misc_feature 1..20: note = chemically synthesized
  source 1..20: mol_type = other DNA
agagggaaaatgggggtcgc

SEQ ID NO: 63422 - DNA, 20 bp, synthetic construct
  misc_feature 1..20: note = chemically synthesized
  source 1..20: mol_type = other DNA
gcctcctctccacaggcttt

SEQ ID NO: 63423 - DNA, 20 bp, synthetic construct
  misc_feature 1..20: note = chemically synthesized
  source 1..20: mol_type = other DNA
gtggatcttcttcagagcca

SEQ ID NO: 63424 - DNA, 20 bp, synthetic construct
  misc_feature 1..20: note = chemically synthesized
  source 1..20: mol_type = other DNA
ccttgctgtggtggcccaca

SEQ ID NO: 63425 - DNA, 20 bp, synthetic construct
  misc_feature 1..20: note = chemically synthesized
  source 1..20: mol_type = other DNA
agggcaaaagctcatgtgat

SEQ ID NO: 63426 - DNA, 20 bp, synthetic construct
  misc_feature 1..20: note = chemically synthesized
  source 1..20: mol_type = other DNA
gatgctgtctctgcaaccac

SEQ ID NO: 63427 - DNA, 20 bp, synthetic construct
  misc_feature 1..20: note = chemically synthesized
  source 1..20: mol_type = other DNA
ggctggcttcagcttttttt

SEQ ID NO: 63428 - DNA, 20 bp, synthetic construct
  misc_feature 1..20: note = chemically synthesized
  source 1..20: mol_type = other DNA
aaaaagtgtggtgaaaatgg

SEQ ID NO: 63429 - DNA, 20 bp, synthetic construct
  misc_feature 1..20: note = chemically synthesized
  source 1..20: mol_type = other DNA
tggagacagaggggagactg

SEQ ID NO: 63430 - DNA, 20 bp, synthetic construct
  misc_feature 1..20: note = chemically synthesized
  source 1..20: mol_type = other DNA
aggggagactgttgaatttg

SEQ ID NO: 63431 - DNA, 20 bp, synthetic construct
  misc_feature 1..20: note = chemically synthesized
  source 1..20: mol_type = other DNA
ctaaacagagagcaacagac

SEQ ID NO: 63432 - DNA, 20 bp, synthetic construct
  misc_feature 1..20: note = chemically synthesized
  source 1..20: mol_type = other DNA
ccctcaactactggccaaga

SEQ ID NO: 63433 - DNA, 20 bp, synthetic construct
  misc_feature 1..20: note = chemically synthesized
  source 1..20: mol_type = other DNA
ggccaagaaggggtgtaact

SEQ ID NO: 63434 - DNA, 20 bp, synthetic construct
  misc_feature 1..20: note = chemically synthesized
  source 1..20: mol_type = other DNA
atgttttcttcttttgtgcc

SEQ ID NO: 63435 - DNA, 20 bp, synthetic construct
  misc_feature 1..20: note = chemically synthesized
  source 1..20: mol_type = other DNA
tgtgccctgagtagcagacc

SEQ ID NO: 63436 - DNA, 20 bp, synthetic construct
  misc_feature 1..20: note = chemically synthesized
  source 1..20: mol_type = other DNA
ctggcttggccaacgacaag

SEQ ID NO: 63437 - DNA, 20 bp, synthetic construct
  misc_feature 1..20: note = chemically synthesized
  source 1..20: mol_type = other DNA
caacgacaagcagggtgacc

SEQ ID NO: 63438 - DNA, 20 bp, synthetic construct
  misc_feature 1..20: note = chemically synthesized
  source 1..20: mol_type = other DNA
aaaaaaaaaggcatcattct

SEQ ID NO: 63439 - DNA, 20 bp, synthetic construct
  misc_feature 1..20: note = chemically synthesized
  source 1..20: mol_type = other DNA
gaggtagcaagccaatgtgt

SEQ ID NO: 63440 - DNA, 20 bp, synthetic construct
  misc_feature 1..20: note = chemically synthesized
  source 1..20: mol_type = other DNA
cagtgatgggaggagacaag

SEQ ID NO: 63441 - DNA, 20 bp, synthetic construct
  misc_feature 1..20: note = chemically synthesized
  source 1..20: mol_type = other DNA
ctgcacccctctggccagca

SEQ ID NO: 63442 - DNA, 20 bp, synthetic construct
  misc_feature 1..20: note = chemically synthesized
  source 1..20: mol_type = other DNA
accttctattggctcagact

SEQ ID NO: 63443 - DNA, 20 bp, synthetic construct
  misc_feature 1..20: note = chemically synthesized
  source 1..20: mol_type = other DNA
gccctgtagtgttcatggac

SEQ ID NO: 63444 - DNA, 20 bp, synthetic construct
  misc_feature 1..20: note = chemically synthesized
  source 1..20: mol_type = other DNA
tgagaggaggacaggactga

SEQ ID NO: 63445 - DNA, 20 bp, synthetic construct
  misc_feature 1..20: note = chemically synthesized
  source 1..20: mol_type = other DNA
gctgtctctccctcagcata

SEQ ID NO: 63446 - DNA, 20 bp, synthetic construct
  misc_feature 1..20: note = chemically synthesized
  source 1..20: mol_type = other DNA
agcatgaggccactaagtgc

SEQ ID NO: 63447 - DNA, 20 bp, synthetic construct
  misc_feature 1..20: note = chemically synthesized
  source 1..20: mol_type = other DNA
cacaagcaacactgggacca

SEQ ID NO: 63448 - DNA, 20 bp, synthetic construct
  misc_feature 1..20: note = chemically synthesized
  source 1..20: mol_type = other DNA
gcaacactgggaccatcgga

SEQ ID NO: 63449 - DNA, 20 bp, synthetic construct
  misc_feature 1..20: note = chemically synthesized
  source 1..20: mol_type = other DNA
ggcacaagttctactgcatt

SEQ ID NO: 63450 - DNA, 20 bp, synthetic construct
  misc_feature 1..20: note = chemically synthesized
  source 1..20: mol_type = other DNA
gaccaccctctgctggccag

SEQ ID NO: 63451 - DNA, 20 bp, synthetic construct
  misc_feature 1..20: note = chemically synthesized
  source 1..20: mol_type = other DNA
ctatggaaaaccagcggggg

SEQ ID NO: 63452 - DNA, 20 bp, synthetic construct
  misc_feature 1..20: note = chemically synthesized
  source 1..20: mol_type = other DNA
ttgccatctttttgagaaga

SEQ ID NO: 63453 - DNA, 20 bp, synthetic construct
  misc_feature 1..20: note = chemically synthesized
  source 1..20: mol_type = other DNA
agaagagggagtgagactca

SEQ ID NO: 63454 - DNA, 20 bp, synthetic construct
  misc_feature 1..20: note = chemically synthesized
  source 1..20: mol_type = other DNA
gtcgttggccaagccaggcc

SEQ ID NO: 63455 - DNA, 20 bp, synthetic construct
  misc_feature 1..20: note = chemically synthesized
  source 1..20: mol_type = other DNA
ggccaagccaggcctagaat

SEQ ID NO: 63456 - DNA, 20 bp, synthetic construct
  misc_feature 1..20: note = chemically synthesized
  source 1..20: mol_type = other DNA
agaatctgggtctccagact

SEQ ID NO: 63457 - DNA, 20 bp, synthetic construct
  misc_feature 1..20: note = chemically synthesized
  source 1..20: mol_type = other DNA
gcacaaaagaagaaaacatt

SEQ ID NO: 63458 - DNA, 20 bp, synthetic construct
  misc_feature 1..20: note = chemically synthesized
  source 1..20: mol_type = other DNA
ccccttcttggccagtagtt

SEQ ID NO: 63459 - DNA, 20 bp, synthetic construct
  misc_feature 1..20: note = chemically synthesized
  source 1..20: mol_type = other DNA
gttgagggtaaattaacgaa

SEQ ID NO: 63460 - DNA, 20 bp, synthetic construct
  misc_feature 1..20: note = chemically synthesized
  source 1..20: mol_type = other DNA
aaaaaaagctgaagccagcc

SEQ ID NO: 63461 - DNA, 20 bp, synthetic construct
  misc_feature 1..20: note = chemically synthesized
  source 1..20: mol_type = other DNA
agaggaggcccacagctctc

SEQ ID NO: 63462 - DNA, 20 bp, synthetic construct
  misc_feature 1..20: note = chemically synthesized
  source 1..20: mol_type = other DNA
atgcatgaggaggggccacc

SEQ ID NO: 63463 - DNA, 20 bp, synthetic construct
  misc_feature 1..20: note = chemically synthesized
  source 1..20: mol_type = other DNA
cctccacaaagccctgcctc

SEQ ID NO: 63464 - DNA, 20 bp, synthetic construct
  misc_feature 1..20: note = chemically synthesized
  source 1..20: mol_type = other DNA
cctccagagttcccataggc

SEQ ID NO: 63465 - DNA, 20 bp, synthetic construct
  misc_feature 1..20: note = chemically synthesized
  source 1..20: mol_type = other DNA
gcctgtgaagtgctctgtgc

SEQ ID NO: 63466 - DNA, 20 bp, synthetic construct
  misc_feature 1..20: note = chemically synthesized
  source 1..20: mol_type = other DNA
ggggataaaggcaagtaacg

SEQ ID NO: 63467 - DNA, 20 bp, synthetic construct
  misc_feature 1..20: note = chemically synthesized
  source 1..20: mol_type = other DNA
taacgtggggtcctctctca

SEQ ID NO: 63468 - DNA, 20 bp, synthetic construct
  misc_feature 1..20: note = chemically synthesized
  source 1..20: mol_type = other DNA
aacagtgtgacaaatgcccc

SEQ ID NO: 63469 - DNA, 20 bp, synthetic construct
  misc_feature 1..20: note = chemically synthesized
  source 1..20: mol_type = other DNA
catgaatggcaggcagaagt

SEQ ID NO: 63470 - DNA, 20 bp, synthetic construct
  misc_feature 1..20: note = chemically synthesized
  source 1..20: mol_type = other DNA
ggccccacctcaggaggtcg

SEQ ID NO: 63471 - DNA, 20 bp, synthetic construct
  misc_feature 1..20: note = chemically synthesized
  source 1..20: mol_type = other DNA
cgtcagccactgccccatag

SEQ ID NO: 63472 - DNA, 20 bp, synthetic construct
  misc_feature 1..20: note = chemically synthesized
  source 1..20: mol_type = other DNA
ggtgaggagccggccaggac

SEQ ID NO: 63473 - DNA, 20 bp, synthetic construct
  misc_feature 1..20: note = chemically synthesized
  source 1..20: mol_type = other DNA
gggacatcagcctctgaaag

SEQ ID NO: 63474 - DNA, 20 bp, synthetic construct
  misc_feature 1..20: note = chemically synthesized
  source 1..20: mol_type = other DNA
atggtcagacccgggaggcc

SEQ ID NO: 63475 - DNA, 20 bp, synthetic construct
  misc_feature 1..20: note = chemically synthesized
  source 1..20: mol_type = other DNA
aggccttgaatgccatgcta

SEQ ID NO: 63476 - DNA, 20 bp, synthetic construct
  misc_feature 1..20: note = chemically synthesized
  source 1..20: mol_type = other DNA
cttgacaagaggcagcagca

SEQ ID NO: 63477 - DNA, 20 bp, synthetic construct
  misc_feature 1..20: note = chemically synthesized
  source 1..20: mol_type = other DNA
aggaggagggggagaagaca

SEQ ID NO: 63478 - DNA, 20 bp, synthetic construct
  misc_feature 1..20: note = chemically synthesized
  source 1..20: mol_type = other DNA
tagaagcccaagcaaaggcc

SEQ ID NO: 63479 - DNA, 20 bp, synthetic construct
  misc_feature 1..20: note = chemically synthesized
  source 1..20: mol_type = other DNA
ccaggcttccagcctgagcg

SEQ ID NO: 63480 - DNA, 20 bp, synthetic construct
  misc_feature 1..20: note = chemically synthesized
  source 1..20: mol_type = other DNA
gcaggctgcgcggtggccgc

SEQ ID NO: 63481 - DNA, 20 bp, synthetic construct
  misc_feature 1..20: note = chemically synthesized
  source 1..20: mol_type = other DNA
cccacggcgagcctcatctt

SEQ ID NO: 63482 - DNA, 20 bp, synthetic construct
  misc_feature 1..20: note = chemically synthesized
  source 1..20: mol_type = other DNA
gacctcccgtgtttgtgcag

SEQ ID NO: 63483 - DNA, 20 bp, synthetic construct
  misc_feature 1..20: note = chemically synthesized
  source 1..20: mol_type = other DNA
ctgagctctggagacgaccc

SEQ ID NO: 63484 - DNA, 20 bp, synthetic construct
  misc_feature 1..20: note = chemically synthesized
  source 1..20: mol_type = other DNA
ggagacgacccgcgagtgga

SEQ ID NO: 63485 - DNA, 20 bp, synthetic construct
  misc_feature 1..20: note = chemically synthesized
  source 1..20: mol_type = other DNA
tcgcgggtcgtctccagagc

SEQ ID NO: 63486 - DNA, 20 bp, synthetic construct
  misc_feature 1..20: note = chemically synthesized
  source 1..20: mol_type = other DNA
tggccaagaaggggtgtaac

SEQ ID NO: 63487 - DNA, 20 bp, synthetic construct
  misc_feature 1..20: note = chemically synthesized
  source 1..20: mol_type = other DNA
aaccttctattggctcagac

SEQ ID NO: 63488 - DNA, 20 bp, synthetic construct
  misc_feature 1..20: note = chemically synthesized
  source 1..20: mol_type = other DNA
ggtcccagtgttgcttgtgt

SEQ ID NO: 63489 - DNA, 20 bp, synthetic construct
  misc_feature 1..20: note = chemically synthesized
  source 1..20: mol_type = other DNA
agggagagacagcatcgccc

SEQ ID NO: 63490 - DNA, 20 bp, synthetic construct
  misc_feature 1..20: note = chemically synthesized
  source 1..20: mol_type = other DNA
gagaagagggagtgagactc

SEQ ID NO: 63491 - DNA, 20 bp, synthetic construct
  misc_feature 1..20: note = chemically synthesized
  source 1..20: mol_type = other DNA
tgtcgttggccaagccaggc

SEQ ID NO: 63492 - DNA, 20 bp, synthetic construct
  misc_feature 1..20: note = chemically synthesized
  source 1..20: mol_type = other DNA
ctgctactcagggcacaaaa

SEQ ID NO: 63493 - DNA, 20 bp, synthetic construct
  misc_feature 1..20: note = chemically synthesized
  source 1..20: mol_type = other DNA
agttgagggtaaattaacga

SEQ ID NO: 63494 - DNA, 20 bp, synthetic construct
  misc_feature 1..20: note = chemically synthesized
  source 1..20: mol_type = other DNA
gcctccagagttcccatagg

SEQ ID NO: 63495 - DNA, 20 bp, synthetic construct
  misc_feature 1..20: note = chemically synthesized
  source 1..20: mol_type = other DNA
ggaattgctagcttatgggg

SEQ ID NO: 63496 - DNA, 20 bp, synthetic construct
  misc_feature 1..20: note = chemically synthesized
  source 1..20: mol_type = other DNA
gcgagtggaaggagtccagc

SEQ ID NO: 63497 - DNA, 20 bp, synthetic construct
  misc_feature 1..20: note = chemically synthesized
  source 1..20: mol_type = other DNA
agcacgtctaaccaggttat

SEQ ID NO: 63498 - DNA, 20 bp, synthetic construct
  misc_feature 1..20: note = chemically synthesized
  source 1..20: mol_type = other DNA
gccaatgtgttggggtagct

SEQ ID NO: 63499 - DNA, 20 bp, synthetic construct
  misc_feature 1..20: note = chemically synthesized
  source 1..20: mol_type = other DNA
ctgtgtctggctgtccctga

SEQ ID NO: 63500 - DNA, 20 bp, synthetic construct
  misc_feature 1..20: note = chemically synthesized
  source 1..20: mol_type = other DNA
ggcttgctacctcaactatg

SEQ ID NO: 63501 - DNA, 20 bp, synthetic construct
  misc_feature 1..20: note = chemically synthesized
  source 1..20: mol_type = other DNA
ctactcagggcacaaaagaa

SEQ ID NO: 63502 - DNA, 20 bp, synthetic construct
  misc_feature 1..20: note = chemically synthesized
  source 1..20: mol_type = other DNA
ctctctgtttaggaagaact

SEQ ID NO: 63503 - DNA, 20 bp, synthetic construct
  misc_feature 1..20: note = chemically synthesized
  source 1..20: mol_type = other DNA
attgctagcttatggggaga

SEQ ID NO: 63504 - DNA, 20 bp, synthetic construct
  misc_feature 1..20: note = chemically synthesized
  source 1..20: mol_type = other DNA
ccgcgatgacaatggctgca

SEQ ID NO: 63505 - DNA, 20 bp, synthetic construct
  misc_feature 1..20: note = chemically synthesized
  source 1..20: mol_type = other DNA
aggaaggggggttgggagag

SEQ ID NO: 63506 - DNA, 20 bp, synthetic construct
  misc_feature 1..20: note = chemically synthesized
  source 1..20: mol_type = other DNA
gctgcacaaacacgggaggt

SEQ ID NO: 63507 - DNA, 20 bp, synthetic construct
  misc_feature 1..20: note = chemically synthesized
  source 1..20: mol_type = other DNA
ctctacgccccacccctggc

SEQ ID NO: 63508 - DNA, 20 bp, synthetic construct
  misc_feature 1..20: note = chemically synthesized
  source 1..20: mol_type = other DNA
gccccacccctggcctttgc

SEQ ID NO: 63509 - DNA, 20 bp, synthetic construct
  misc_feature 1..20: note = chemically synthesized
  source 1..20: mol_type = other DNA
gccatcgagcggtcagagca

SEQ ID NO: 63510 - DNA, 20 bp, synthetic construct
  misc_feature 1..20: note = chemically synthesized
  source 1..20: mol_type = other DNA
tggggcatttgtcacactgt

SEQ ID NO: 63511 - DNA, 20 bp, synthetic construct
  misc_feature 1..20: note = chemically synthesized
  source 1..20: mol_type = other DNA
ttgtcacactgttggggctt

SEQ ID NO: 63512 - DNA, 20 bp, synthetic construct
  misc_feature 1..20: note = chemically synthesized
  source 1..20: mol_type = other DNA
acactgttggggcttccacg

SEQ ID NO: 63513 - DNA, 20 bp, synthetic construct
  misc_feature 1..20: note = chemically synthesized
  source 1..20: mol_type = other DNA
gcctatgggaactctggagg

SEQ ID NO: 63514 - DNA, 20 bp, synthetic construct
  misc_feature 1..20: note = chemically synthesized
  source 1..20: mol_type = other DNA
ggctttgtggaggggctgcc

SEQ ID NO: 63515 - DNA, 20 bp, synthetic construct
  misc_feature 1..20: note = chemically synthesized
  source 1..20: mol_type = other DNA
ccacaggcttatgttgcctc

SEQ ID NO: 63516 - DNA, 20 bp, synthetic construct
  misc_feature 1..20: note = chemically synthesized
  source 1..20: mol_type = other DNA
gagctgtgggcctcctctcc

SEQ ID NO: 63517 - DNA, 20 bp, synthetic construct
  misc_feature 1..20: note = chemically synthesized
  source 1..20: mol_type = other DNA
ggatgctgtctctgcaacca

SEQ ID NO: 63518 - DNA, 20 bp, synthetic construct
  misc_feature 1..20: note = chemically synthesized
  source 1..20: mol_type = other DNA
gattttaatagttacccatg

SEQ ID NO: 63519 - DNA, 20 bp, synthetic construct
  misc_feature 1..20: note = chemically synthesized
  source 1..20: mol_type = other DNA
aatagttacccatggctggc

SEQ ID NO: 63520 - DNA, 20 bp, synthetic construct
  misc_feature 1..20: note = chemically synthesized
  source 1..20: mol_type = other DNA
aggggagactgttgaatttg

SEQ ID NO: 63521 - DNA, 20 bp, synthetic construct
  misc_feature 1..20: note = chemically synthesized
  source 1..20: mol_type = other DNA
ccaagaaggggtgtaactca

SEQ ID NO: 63522 - DNA, 20 bp, synthetic construct
  misc_feature 1..20: note = chemically synthesized
  source 1..20: mol_type = other DNA
gcagacccagagtctggaga

SEQ ID NO: 63523 - DNA, 20 bp, synthetic construct
  misc_feature 1..20: note = chemically synthesized
  source 1..20: mol_type = other DNA
ctggagacccagattctagg

SEQ ID NO: 63524 - DNA, 20 bp, synthetic construct
  misc_feature 1..20: note = chemically synthesized
  source 1..20: mol_type = other DNA
aagatggcaattcctccccc

SEQ ID NO: 63525 - DNA, 20 bp, synthetic construct
  misc_feature 1..20: note = chemically synthesized
  source 1..20: mol_type = other DNA
tgaaaacgccctgtgcatac

SEQ ID NO: 63526 - DNA, 20 bp, synthetic construct
  misc_feature 1..20: note = chemically synthesized
  source 1..20: mol_type = other DNA
agacaaggcggatacagagg

SEQ ID NO: 63527 - DNA, 20 bp, synthetic construct
  misc_feature 1..20: note = chemically synthesized
  source 1..20: mol_type = other DNA
agcatgaggccactaagtgc

SEQ ID NO: 63528 - DNA, 20 bp, synthetic construct
  misc_feature 1..20: note = chemically synthesized
  source 1..20: mol_type = other DNA
attccatccgatggtcccag

SEQ ID NO: 63529 - DNA, 20 bp, synthetic construct
  misc_feature 1..20: note = chemically synthesized
  source 1..20: mol_type = other DNA
tgtgtgaagaaagcctccta

SEQ ID NO: 63530 - DNA, 20 bp, synthetic construct
  misc_feature 1..20: note = chemically synthesized
  source 1..20: mol_type = other DNA
gccctgatgcaatcaaggta

SEQ ID NO: 63531 - DNA, 20 bp, synthetic construct
  misc_feature 1..20: note = chemically synthesized
  source 1..20: mol_type = other DNA
actgggaccatcggatggaa

SEQ ID NO: 63532 - DNA, 20 bp, synthetic construct
  misc_feature 1..20: note = chemically synthesized
  source 1..20: mol_type = other DNA
tccgacactgcacaccatct

SEQ ID NO: 63533 - DNA, 20 bp, synthetic construct
  misc_feature 1..20: note = chemically synthesized
  source 1..20: mol_type = other DNA
gaaggttgccctaatggcct

SEQ ID NO: 63534 - DNA, 20 bp, synthetic construct
  misc_feature 1..20: note = chemically synthesized
  source 1..20: mol_type = other DNA
cataagcctcagtatgcaca

SEQ ID NO: 63535 - DNA, 20 bp, synthetic construct
  misc_feature 1..20: note = chemically synthesized
  source 1..20: mol_type = other DNA
gttttcagctaccccaacac

SEQ ID NO: 63536 - DNA, 20 bp, synthetic construct
  misc_feature 1..20: note = chemically synthesized
  source 1..20: mol_type = other DNA
ttttttttaacccaaggtca

SEQ ID NO: 63537 - DNA, 20 bp, synthetic construct
  misc_feature 1..20: note = chemically synthesized
  source 1..20: mol_type = other DNA
tgtaactcttgtctgttgct

SEQ ID NO: 63538 - DNA, 20 bp, synthetic construct
  misc_feature 1..20: note = chemically synthesized
  source 1..20: mol_type = other DNA
agagacagcatccctatcac

SEQ ID NO: 63539 - DNA, 20 bp, synthetic construct
  misc_feature 1..20: note = chemically synthesized
  source 1..20: mol_type = other DNA
gggtcctctctcaaggaatt

SEQ ID NO: 63540 - DNA, 20 bp, synthetic construct
  misc_feature 1..20: note = chemically synthesized
  source 1..20: mol_type = other DNA
caggacttggatccaagaag

SEQ ID NO: 63541 - DNA, 20 bp, synthetic construct
  misc_feature 1..20: note = chemically synthesized
  source 1..20: mol_type = other DNA
atgctctgaccgctcgatgg

SEQ ID NO: 63542 - DNA, 20 bp, synthetic construct
  misc_feature 1..20: note = chemically synthesized
  source 1..20: mol_type = other DNA
cttgacaagaggcagcagca

SEQ ID NO: 63543 - DNA, 20 bp, synthetic construct
  misc_feature 1..20: note = chemically synthesized
  source 1..20: mol_type = other DNA
tgataacctggttagacgtg

SEQ ID NO: 63544 - DNA, 20 bp, synthetic construct
  misc_feature 1..20: note = chemically synthesized
  source 1..20: mol_type = other DNA
atttattgtatttcactgct

SEQ ID NO: 63545 - DNA, 20 bp, synthetic construct
  misc_feature 1..20: note = chemically synthesized
  source 1..20: mol_type = other DNA
atggaaaggcacccagacac

SEQ ID NO: 63546 - DNA, 20 bp, synthetic construct
  misc_feature 1..20: note = chemically synthesized
  source 1..20: mol_type = other DNA
tgagcagcgagcacagtcgg

SEQ ID NO: 63547 - DNA, 20 bp, synthetic construct
  misc_feature 1..20: note = chemically synthesized
  source 1..20: mol_type = other DNA
tgggcgcaatctttgacctc

SEQ ID NO: 63548 - DNA, 22 bp, synthetic construct
  misc_feature 1..22: note = chemically synthesized
  source 1..22: mol_type = other DNA
cattgtgcttcatgtcccttcc

SEQ ID NO: 63549 - DNA, 22 bp, synthetic construct
  misc_feature 1..22: note = chemically synthesized
  source 1..22: mol_type = other DNA
tgcttcatgtcccttcccatca

SEQ ID NO: 63550 - DNA, 22 bp, synthetic construct
  misc_feature 1..22: note = chemically synthesized
  source 1..22: mol_type = other DNA
catgtcccttcccatcaacatt

SEQ ID NO: 63551 - DNA, 22 bp, synthetic construct
  misc_feature 1..22: note = chemically synthesized
  source 1..22: mol_type = other DNA
atgtcccttcccatcaacattt

SEQ ID NO: 63552 - DNA, 22 bp, synthetic construct
  misc_feature 1..22: note = chemically synthesized
  source 1..22: mol_type = other DNA
cccatcaacatttctgtgctgg

SEQ ID NO: 63553 - DNA, 22 bp, synthetic construct
  misc_feature 1..22: note = chemically synthesized
  source 1..22: mol_type = other DNA
ccatcaacatttctgtgctgga

SEQ ID NO: 63554 - DNA, 22 bp, synthetic construct
  misc_feature 1..22: note = chemically synthesized
  source 1..22: mol_type = other DNA
ctgtgctggactccttccactc

SEQ ID NO: 63555 - DNA, 22 bp, synthetic construct
  misc_feature 1..22: note = chemically synthesized
  source 1..22: mol_type = other DNA
tgtgctggactccttccactcg

SEQ ID NO: 63556 - DNA, 22 bp, synthetic construct
  misc_feature 1..22: note = chemically synthesized
  source 1..22: mol_type = other DNA
tgctggactccttccactcgcg

SEQ ID NO: 63557 - DNA, 22 bp, synthetic construct
  misc_feature 1..22: note = chemically synthesized
  source 1..22: mol_type = other DNA
gactccttccactcgcgggtcg

SEQ ID NO: 63558 - DNA, 22 bp, synthetic construct
  misc_feature 1..22: note = chemically synthesized
  source 1..22: mol_type = other DNA
cttccactcgcgggtcgtctcc

SEQ ID NO: 63559 - DNA, 22 bp, synthetic construct
  misc_feature 1..22: note = chemically synthesized
  source 1..22: mol_type = other DNA
ccactcgcgggtcgtctccaga

SEQ ID NO: 63560 - DNA, 22 bp, synthetic construct
  misc_feature 1..22: note = chemically synthesized
  source 1..22: mol_type = other DNA
cactcgcgggtcgtctccagag

SEQ ID NO: 63561 - DNA, 22 bp, synthetic construct
  misc_feature 1..22: note = chemically synthesized
  source 1..22: mol_type = other DNA
gcgggtcgtctccagagctcag

SEQ ID NO: 63562 - DNA, 22 bp, synthetic construct
  misc_feature 1..22: note = chemically synthesized
  source 1..22: mol_type = other DNA
cagagctcagaaaatgaggtga

SEQ ID NO: 63563 - DNA, 22 bp, synthetic construct
  misc_feature 1..22: note = chemically synthesized
  source 1..22: mol_type = other DNA
agaaaatgaggtgatcagtggg

SEQ ID NO: 63564 - DNA, 22 bp, synthetic construct
  misc_feature 1..22: note = chemically synthesized
  source 1..22: mol_type = other DNA
ggagaggggcgattgggcaacc

SEQ ID NO: 63565 - DNA, 22 bp, synthetic construct
  misc_feature 1..22: note = chemically synthesized
  source 1..22: mol_type = other DNA
ggcaacccggctgcacaaacac

SEQ ID NO: 63566 - DNA, 22 bp, synthetic construct
  misc_feature 1..22: note = chemically synthesized
  source 1..22: mol_type = other DNA
cacaaacacgggaggtcaaaga

SEQ ID NO: 63567 - DNA, 22 bp, synthetic construct
  misc_feature 1..22: note = chemically synthesized
  source 1..22: mol_type = other DNA
cgcccagcccgcccaggccggg

SEQ ID NO: 63568 - DNA, 22 bp, synthetic construct
  misc_feature 1..22: note = chemically synthesized
  source 1..22: mol_type = other DNA
cacagaagcgagtccgactgtg

SEQ ID NO: 63569 - DNA, 22 bp, synthetic construct
  misc_feature 1..22: note = chemically synthesized
  source 1..22: mol_type = other DNA
tgctcgctgctcagcgccgcac

SEQ ID NO: 63570 - DNA, 22 bp, synthetic construct
  misc_feature 1..22: note = chemically synthesized
  source 1..22: mol_type = other DNA
gctgctcagcgccgcacccgga

SEQ ID NO: 63571 - DNA, 22 bp, synthetic construct
  misc_feature 1..22: note = chemically synthesized
  source 1..22: mol_type = other DNA
ctcagcgccgcacccggaagat

SEQ ID NO: 63572 - DNA, 22 bp, synthetic construct
  misc_feature 1..22: note = chemically synthesized
  source 1..22: mol_type = other DNA
agcgccgcacccggaagatgag

SEQ ID NO: 63573 - DNA, 22 bp, synthetic construct
  misc_feature 1..22: note = chemically synthesized
  source 1..22: mol_type = other DNA
gccgtgggagccctgctggtct

SEQ ID NO: 63574 - DNA, 22 bp, synthetic construct
  misc_feature 1..22: note = chemically synthesized
  source 1..22: mol_type = other DNA
ctggtctgcgccgtcctgggtg

SEQ ID NO: 63575 - DNA, 22 bp, synthetic construct
  misc_feature 1..22: note = chemically synthesized
  source 1..22: mol_type = other DNA
gtctgcgccgtcctgggtgagt

SEQ ID NO: 63576 - DNA, 22 bp, synthetic construct
  misc_feature 1..22: note = chemically synthesized
  source 1..22: mol_type = other DNA
cgccgtcctgggtgagtgcggg

SEQ ID NO: 63577 - DNA, 22 bp, synthetic construct
  misc_feature 1..22: note = chemically synthesized
  source 1..22: mol_type = other DNA
ggtgagtgcgggcacggggtag

SEQ ID NO: 63578 - DNA, 22 bp, synthetic construct
  misc_feature 1..22: note = chemically synthesized
  source 1..22: mol_type = other DNA
gcccgcgcgttccctgcaaccc

SEQ ID NO: 63579 - DNA, 22 bp, synthetic construct
  misc_feature 1..22: note = chemically synthesized
  source 1..22: mol_type = other DNA
cctgcaacccgggcggccaccg

SEQ ID NO: 63580 - DNA, 22 bp, synthetic construct
  misc_feature 1..22: note = chemically synthesized
  source 1..22: mol_type = other DNA
caacccgggcggccaccgcgca

SEQ ID NO: 63581 - DNA, 22 bp, synthetic construct
  misc_feature 1..22: note = chemically synthesized
  source 1..22: mol_type = other DNA
catgcactccgcgctcaggctg

SEQ ID NO: 63582 - DNA, 22 bp, synthetic construct
  misc_feature 1..22: note = chemically synthesized
  source 1..22: mol_type = other DNA
cgcgctcaggctggaagcctgg

SEQ ID NO: 63583 - DNA, 22 bp, synthetic construct
  misc_feature 1..22: note = chemically synthesized
  source 1..22: mol_type = other DNA
aggctggaagcctgggtgtctg

SEQ ID NO: 63584 - DNA, 22 bp, synthetic construct
  misc_feature 1..22: note = chemically synthesized
  source 1..22: mol_type = other DNA
gaagcctgggtgtctgggtgcc

SEQ ID NO: 63585 - DNA, 22 bp, synthetic construct
  misc_feature 1..22: note = chemically synthesized
  source 1..22: mol_type = other DNA
ggtgtctgggtgcctttccatt

SEQ ID NO: 63586 - DNA, 22 bp, synthetic construct
  misc_feature 1..22: note = chemically synthesized
  source 1..22: mol_type = other DNA
ggtgcctttccattgcctctct

SEQ ID NO: 63587 - DNA, 22 bp, synthetic construct
  misc_feature 1..22: note = chemically synthesized
  source 1..22: mol_type = other DNA
tccattgcctctctacgcccca

SEQ ID NO: 63588 - DNA, 22 bp, synthetic construct
  misc_feature 1..22: note = chemically synthesized
  source 1..22: mol_type = other DNA
ccattgcctctctacgccccac

SEQ ID NO: 63589 - DNA, 22 bp, synthetic construct
  misc_feature 1..22: note = chemically synthesized
  source 1..22: mol_type = other DNA
cattgcctctctacgccccacc

SEQ ID NO: 63590 - DNA, 22 bp, synthetic construct
  misc_feature 1..22: note = chemically synthesized
  source 1..22: mol_type = other DNA
cctctctacgccccacccctgg

SEQ ID NO: 63591 - DNA, 22 bp, synthetic construct
  misc_feature 1..22: note = chemically synthesized
  source 1..22: mol_type = other DNA
tctacgccccacccctggcctt

SEQ ID NO: 63592 - DNA, 22 bp, synthetic construct
  misc_feature 1..22: note = chemically synthesized
  source 1..22: mol_type = other DNA
tacgccccacccctggcctttg

SEQ ID NO: 63593 - DNA, 22 bp, synthetic construct
  misc_feature 1..22: note = chemically synthesized
  source 1..22: mol_type = other DNA
cgccccacccctggcctttgct

SEQ ID NO: 63594 - DNA, 22 bp, synthetic construct
  misc_feature 1..22: note = chemically synthesized
  source 1..22: mol_type = other DNA
gcctttgcttgggcttctagac

SEQ ID NO: 63595 - DNA, 22 bp, synthetic construct
  misc_feature 1..22: note = chemically synthesized
  source 1..22: mol_type = other DNA
tgcttgggcttctagacacctt

SEQ ID NO: 63596 - DNA, 22 bp, synthetic construct
  misc_feature 1..22: note = chemically synthesized
  source 1..22: mol_type = other DNA
gcttgggcttctagacaccttt

SEQ ID NO: 63597 - DNA, 22 bp, synthetic construct
  misc_feature 1..22: note = chemically synthesized
  source 1..22: mol_type = other DNA
cttgggcttctagacacctttc

SEQ ID NO: 63598 - DNA, 22 bp, synthetic construct
  misc_feature 1..22: note = chemically synthesized
  source 1..22: mol_type = other DNA
gggcttctagacacctttcact

SEQ ID NO: 63599 - DNA, 22 bp, synthetic construct
  misc_feature 1..22: note = chemically synthesized
  source 1..22: mol_type = other DNA
ggcttctagacacctttcactg

SEQ ID NO: 63600 - DNA, 22 bp, synthetic construct
  misc_feature 1..22: note = chemically synthesized
  source 1..22: mol_type = other DNA
ctagacacctttcactgcactc

SEQ ID NO: 63601 - DNA, 22 bp, synthetic construct
  misc_feature 1..22: note = chemically synthesized
  source 1..22: mol_type = other DNA
tagacacctttcactgcactca

SEQ ID NO: 63602 - DNA, 22 bp, synthetic construct
  misc_feature 1..22: note = chemically synthesized
  source 1..22: mol_type = other DNA
gacacctttcactgcactcact

SEQ ID NO: 63603 - DNA, 22 bp, synthetic construct
  misc_feature 1..22: note = chemically synthesized
  source 1..22: mol_type = other DNA
tcactgcactcactgtcttctc

SEQ ID NO: 63604 - DNA, 22 bp, synthetic construct
  misc_feature 1..22: note = chemically synthesized
  source 1..22: mol_type = other DNA
cactgcactcactgtcttctcc

SEQ ID NO: 63605 - DNA, 22 bp, synthetic construct
  misc_feature 1..22: note = chemically synthesized
  source 1..22: mol_type = other DNA
actgcactcactgtcttctccc

SEQ ID NO: 63606 - DNA, 22 bp, synthetic construct
  misc_feature 1..22: note = chemically synthesized
  source 1..22: mol_type = other DNA
cactcactgtcttctccccctc

SEQ ID NO: 63607 - DNA, 22 bp, synthetic construct
  misc_feature 1..22: note = chemically synthesized
  source 1..22: mol_type = other DNA
actgtcttctccccctcctcct

SEQ ID NO: 63608 - DNA, 22 bp, synthetic construct
  misc_feature 1..22: note = chemically synthesized
  source 1..22: mol_type = other DNA
tcttctccccctcctcctcttt

SEQ ID NO: 63609 - DNA, 22 bp, synthetic construct
  misc_feature 1..22: note = chemically synthesized
  source 1..22: mol_type = other DNA
ctccccctcctcctctttgtcc

SEQ ID NO: 63610 - DNA, 22 bp, synthetic construct
  misc_feature 1..22: note = chemically synthesized
  source 1..22: mol_type = other DNA
tccccctcctcctctttgtcca

SEQ ID NO: 63611 - DNA, 22 bp, synthetic construct
  misc_feature 1..22: note = chemically synthesized
  source 1..22: mol_type = other DNA
cccctcctcctctttgtccagt

SEQ ID NO: 63612 - DNA, 22 bp, synthetic construct
  misc_feature 1..22: note = chemically synthesized
  source 1..22: mol_type = other DNA
ctcctctttgtccagtaaatct

SEQ ID NO: 63613 - DNA, 22 bp, synthetic construct
  misc_feature 1..22: note = chemically synthesized
  source 1..22: mol_type = other DNA
ctctttgtccagtaaatcttgc

SEQ ID NO: 63614 - DNA, 22 bp, synthetic construct
  misc_feature 1..22: note = chemically synthesized
  source 1..22: mol_type = other DNA
tttgtccagtaaatcttgcagc

SEQ ID NO: 63615 - DNA, 22 bp, synthetic construct
  misc_feature 1..22: note = chemically synthesized
  source 1..22: mol_type = other DNA
tgtccagtaaatcttgcagcag

SEQ ID NO: 63616 - DNA, 22 bp, synthetic construct
  misc_feature 1..22: note = chemically synthesized
  source 1..22: mol_type = other DNA
gtccagtaaatcttgcagcagt

SEQ ID NO: 63617 - DNA, 22 bp, synthetic construct
  misc_feature 1..22: note = chemically synthesized
  source 1..22: mol_type = other DNA
tccagtaaatcttgcagcagtg

SEQ ID NO: 63618 - DNA, 22 bp, synthetic construct
  misc_feature 1..22: note = chemically synthesized
  source 1..22: mol_type = other DNA
gcagcagtgaaatacaataaat

SEQ ID NO: 63619 - DNA, 22 bp, synthetic construct
  misc_feature 1..22: note = chemically synthesized
  source 1..22: mol_type = other DNA
cagcagtgaaatacaataaatc

SEQ ID NO: 63620 - DNA, 22 bp, synthetic construct
  misc_feature 1..22: note = chemically synthesized
  source 1..22: mol_type = other DNA
accaggttatcaaaaccctttg

SEQ ID NO: 63621 - DNA, 22 bp, synthetic construct
  misc_feature 1..22: note = chemically synthesized
  source 1..22: mol_type = other DNA
tcaaaaccctttgctgctgcct

SEQ ID NO: 63622 - DNA, 22 bp, synthetic construct
  misc_feature 1..22: note = chemically synthesized
  source 1..22: mol_type = other DNA
tgctgctgcctcttgtcaagtc

SEQ ID NO: 63623 - DNA, 22 bp, synthetic construct
  misc_feature 1..22: note = chemically synthesized
  source 1..22: mol_type = other DNA
gctgctgcctcttgtcaagtcc

SEQ ID NO: 63624 - DNA, 22 bp, synthetic construct
  misc_feature 1..22: note = chemically synthesized
  source 1..22: mol_type = other DNA
ctgctgcctcttgtcaagtccg

SEQ ID NO: 63625 - DNA, 22 bp, synthetic construct
  misc_feature 1..22: note = chemically synthesized
  source 1..22: mol_type = other DNA
ctgcctcttgtcaagtccgaac

SEQ ID NO: 63626 - DNA, 22 bp, synthetic construct
  misc_feature 1..22: note = chemically synthesized
  source 1..22: mol_type = other DNA
cctcttgtcaagtccgaactcc

SEQ ID NO: 63627 - DNA, 22 bp, synthetic construct
  misc_feature 1..22: note = chemically synthesized
  source 1..22: mol_type = other DNA
ttgtcaagtccgaactccttag

SEQ ID NO: 63628 - DNA, 22 bp, synthetic construct
  misc_feature 1..22: note = chemically synthesized
  source 1..22: mol_type = other DNA
gtcaagtccgaactccttagca

SEQ ID NO: 63629 - DNA, 22 bp, synthetic construct
  misc_feature 1..22: note = chemically synthesized
  source 1..22: mol_type = other DNA
tcaagtccgaactccttagcat

SEQ ID NO: 63630 - DNA, 22 bp, synthetic construct
  misc_feature 1..22: note = chemically synthesized
  source 1..22: mol_type = other DNA
cttagcatggcattcaaggcct

SEQ ID NO: 63631 - DNA, 22 bp, synthetic construct
  misc_feature 1..22: note = chemically synthesized
  source 1..22: mol_type = other DNA
agcatggcattcaaggcctccc

SEQ ID NO: 63632 - DNA, 22 bp, synthetic construct
  misc_feature 1..22: note = chemically synthesized
  source 1..22: mol_type = other DNA
gcatggcattcaaggcctcccg

SEQ ID NO: 63633 - DNA, 22 bp, synthetic construct
  misc_feature 1..22: note = chemically synthesized
  source 1..22: mol_type = other DNA
aaggcctcccgggtctgaccat

SEQ ID NO: 63634 - DNA, 22 bp, synthetic construct
  misc_feature 1..22: note = chemically synthesized
  source 1..22: mol_type = other DNA
ccgggtctgaccattccccttt

SEQ ID NO: 63635 - DNA, 22 bp, synthetic construct
  misc_feature 1..22: note = chemically synthesized
  source 1..22: mol_type = other DNA
accattcccctttcagaggctg

SEQ ID NO: 63636 - DNA, 22 bp, synthetic construct
  misc_feature 1..22: note = chemically synthesized
  source 1..22: mol_type = other DNA
ccctttcagaggctgatgtccc

SEQ ID NO: 63637 - DNA, 22 bp, synthetic construct
  misc_feature 1..22: note = chemically synthesized
  source 1..22: mol_type = other DNA
tcagaggctgatgtcccctggg

SEQ ID NO: 63638 - DNA, 22 bp, synthetic construct
  misc_feature 1..22: note = chemically synthesized
  source 1..22: mol_type = other DNA
cagaggctgatgtcccctgggt

SEQ ID NO: 63639 - DNA, 22 bp, synthetic construct
  misc_feature 1..22: note = chemically synthesized
  source 1..22: mol_type = other DNA
agaggctgatgtcccctgggtg

SEQ ID NO: 63640 - DNA, 22 bp, synthetic construct
  misc_feature 1..22: note = chemically synthesized
  source 1..22: mol_type = other DNA
atgtcccctgggtgccctggga

SEQ ID NO: 63641 - DNA, 22 bp, synthetic construct
  misc_feature 1..22: note = chemically synthesized
  source 1..22: mol_type = other DNA
ggtgccctgggagctgtagatg

SEQ ID NO: 63642 - DNA, 22 bp, synthetic construct
  misc_feature 1..22: note = chemically synthesized
  source 1..22: mol_type = other DNA
ggagctgtagatgtcctgccaa

SEQ ID NO: 63643 - DNA, 22 bp, synthetic construct
  misc_feature 1..22: note = chemically synthesized
  source 1..22: mol_type = other DNA
tagatgtcctgccaaggaagcg

SEQ ID NO: 63644 - DNA, 22 bp, synthetic construct
  misc_feature 1..22: note = chemically synthesized
  source 1..22: mol_type = other DNA
ccaaggaagcggtgccatcgag

SEQ ID NO: 63645 - DNA, 22 bp, synthetic construct
  misc_feature 1..22: note = chemically synthesized
  source 1..22: mol_type = other DNA
gaagccagacttcttggatcca

SEQ ID NO: 63646 - DNA, 22 bp, synthetic construct
  misc_feature 1..22: note = chemically synthesized
  source 1..22: mol_type = other DNA
aagccagacttcttggatccaa

SEQ ID NO: 63647 - DNA, 22 bp, synthetic construct
  misc_feature 1..22: note = chemically synthesized
  source 1..22: mol_type = other DNA
cttggatccaagtcctggccgg

SEQ ID NO: 63648 - DNA, 22 bp, synthetic construct
  misc_feature 1..22: note = chemically synthesized
  source 1..22: mol_type = other DNA
ttggatccaagtcctggccggc

SEQ ID NO: 63649 - DNA, 22 bp, synthetic construct
  misc_feature 1..22: note = chemically synthesized
  source 1..22: mol_type = other DNA
ggatccaagtcctggccggctc

SEQ ID NO: 63650 - DNA, 22 bp, synthetic construct
  misc_feature 1..22: note = chemically synthesized
  source 1..22: mol_type = other DNA
gatccaagtcctggccggctcc

SEQ ID NO: 63651 - DNA, 22 bp, synthetic construct
  misc_feature 1..22: note = chemically synthesized
  source 1..22: mol_type = other DNA
gccggctcctcaccagggaggg

SEQ ID NO: 63652 - DNA, 22 bp, synthetic construct
  misc_feature 1..22: note = chemically synthesized
  source 1..22: mol_type = other DNA
ctcaccagggagggggtcatca

SEQ ID NO: 63653 - DNA, 22 bp, synthetic construct
  misc_feature 1..22: note = chemically synthesized
  source 1..22: mol_type = other DNA
accagggagggggtcatcacag

SEQ ID NO: 63654 - DNA, 22 bp, synthetic construct
  misc_feature 1..22: note = chemically synthesized
  source 1..22: mol_type = other DNA
gcctgggagggtcaaatgaggg

SEQ ID NO: 63655 - DNA, 22 bp, synthetic construct
  misc_feature 1..22: note = chemically synthesized
  source 1..22: mol_type = other DNA
cctgggagggtcaaatgagggt

SEQ ID NO: 63656 - DNA, 22 bp, synthetic construct
  misc_feature 1..22: note = chemically synthesized
  source 1..22: mol_type = other DNA
ggagggtcaaatgagggtcagc

SEQ ID NO: 63657 - DNA, 22 bp, synthetic construct
  misc_feature 1..22: note = chemically synthesized
  source 1..22: mol_type = other DNA
agtaccagtggcagatgttgca

SEQ ID NO: 63658 - DNA, 22 bp, synthetic construct
  misc_feature 1..22: note = chemically synthesized
  source 1..22: mol_type = other DNA
cacacatcctgctatggggcag

SEQ ID NO: 63659 - DNA, 22 bp, synthetic construct
  misc_feature 1..22: note = chemically synthesized
  source 1..22: mol_type = other DNA
ctatggggcagtggctgacgcc

SEQ ID NO: 63660 - DNA, 22 bp, synthetic construct
  misc_feature 1..22: note = chemically synthesized
  source 1..22: mol_type = other DNA
tggggcagtggctgacgccaca

SEQ ID NO: 63661 - DNA, 22 bp, synthetic construct
  misc_feature 1..22: note = chemically synthesized
  source 1..22: mol_type = other DNA
acgccacactccccgacctcct

SEQ ID NO: 63662 - DNA, 22 bp, synthetic construct
  misc_feature 1..22: note = chemically synthesized
  source 1..22: mol_type = other DNA
cccgacctcctgaggtggggcc

SEQ ID NO: 63663 - DNA, 22 bp, synthetic construct
  misc_feature 1..22: note = chemically synthesized
  source 1..22: mol_type = other DNA
ctgaggtggggcccccttcata

SEQ ID NO: 63664 - DNA, 22 bp, synthetic construct
  misc_feature 1..22: note = chemically synthesized
  source 1..22: mol_type = other DNA
aggtggggcccccttcatactc

SEQ ID NO: 63665 - DNA, 22 bp, synthetic construct
  misc_feature 1..22: note = chemically synthesized
  source 1..22: mol_type = other DNA
catactctaacttctgcctgcc

SEQ ID NO: 63666 - DNA, 22 bp, synthetic construct
  misc_feature 1..22: note = chemically synthesized
  source 1..22: mol_type = other DNA
atactctaacttctgcctgcca

SEQ ID NO: 63667 - DNA, 22 bp, synthetic construct
  misc_feature 1..22: note = chemically synthesized
  source 1..22: mol_type = other DNA
taacttctgcctgccattcatg

SEQ ID NO: 63668 - DNA, 22 bp, synthetic construct
  misc_feature 1..22: note = chemically synthesized
  source 1..22: mol_type = other DNA
acttctgcctgccattcatggg

SEQ ID NO: 63669 - DNA, 22 bp, synthetic construct
  misc_feature 1..22: note = chemically synthesized
  source 1..22: mol_type = other DNA
ctgcctgccattcatggggcat

SEQ ID NO: 63670 - DNA, 22 bp, synthetic construct
  misc_feature 1..22: note = chemically synthesized
  source 1..22: mol_type = other DNA
tgcctgccattcatggggcatt

SEQ ID NO: 63671 - DNA, 22 bp, synthetic construct
  misc_feature 1..22: note = chemically synthesized
  source 1..22: mol_type = other DNA
cctgccattcatggggcatttg

SEQ ID NO: 63672 - DNA, 22 bp, synthetic construct
  misc_feature 1..22: note = chemically synthesized
  source 1..22: mol_type = other DNA
ccattcatggggcatttgtcac

SEQ ID NO: 63673 - DNA, 22 bp, synthetic construct
  misc_feature 1..22: note = chemically synthesized
  source 1..22: mol_type = other DNA
atggggcatttgtcacactgtt

SEQ ID NO: 63674 - DNA, 22 bp, synthetic construct
  misc_feature 1..22: note = chemically synthesized
  source 1..22: mol_type = other DNA
gtcacactgttggggcttccac

SEQ ID NO: 63675 - DNA, 22 bp, synthetic construct
  misc_feature 1..22: note = chemically synthesized
  source 1..22: mol_type = other DNA
tcacactgttggggcttccacg

SEQ ID NO: 63676 - DNA, 22 bp, synthetic construct
  misc_feature 1..22: note = chemically synthesized
  source 1..22: mol_type = other DNA
ttggggcttccacgtttagttt

SEQ ID NO: 63677 - DNA, 22 bp, synthetic construct
  misc_feature 1..22: note = chemically synthesized
  source 1..22: mol_type = other DNA
gggcttccacgtttagttttct

SEQ ID NO: 63678 - DNA, 22 bp, synthetic construct
  misc_feature 1..22: note = chemically synthesized
  source 1..22: mol_type = other DNA
ccacgtttagttttctctcccc

SEQ ID NO: 63679 - DNA, 22 bp, synthetic construct
  misc_feature 1..22: note = chemically synthesized
  source 1..22: mol_type = other DNA
cacgtttagttttctctcccca

SEQ ID NO: 63680 - DNA, 22 bp, synthetic construct
  misc_feature 1..22: note = chemically synthesized
  source 1..22: mol_type = other DNA
agttttctctccccataagcta

SEQ ID NO: 63681 - DNA, 22 bp, synthetic construct
  misc_feature 1..22: note = chemically synthesized
  source 1..22: mol_type = other DNA
gttttctctccccataagctag

SEQ ID NO: 63682 - DNA, 22 bp, synthetic construct
  misc_feature 1..22: note = chemically synthesized
  source 1..22: mol_type = other DNA
tctctccccataagctagcaat

SEQ ID NO: 63683 - DNA, 22 bp, synthetic construct
  misc_feature 1..22: note = chemically synthesized
  source 1..22: mol_type = other DNA
ctctccccataagctagcaatt

SEQ ID NO: 63684 - DNA, 22 bp, synthetic construct
  misc_feature 1..22: note = chemically synthesized
  source 1..22: mol_type = other DNA
tctccccataagctagcaattc

SEQ ID NO: 63685 - DNA, 22 bp, synthetic construct
  misc_feature 1..22: note = chemically synthesized
  source 1..22: mol_type = other DNA
tccccataagctagcaattcct

SEQ ID NO: 63686 - DNA, 22 bp, synthetic construct
  misc_feature 1..22: note = chemically synthesized
  source 1..22: mol_type = other DNA
cccataagctagcaattccttg

SEQ ID NO: 63687 - DNA, 22 bp, synthetic construct
  misc_feature 1..22: note = chemically synthesized
  source 1..22: mol_type = other DNA
gcaattccttgagagaggaccc

SEQ ID NO: 63688 - DNA, 22 bp, synthetic construct
  misc_feature 1..22: note = chemically synthesized
  source 1..22: mol_type = other DNA
cttgagagaggaccccacgtta

SEQ ID NO: 63689 - DNA, 22 bp, synthetic construct
  misc_feature 1..22: note = chemically synthesized
  source 1..22: mol_type = other DNA
gagagaggaccccacgttactt

SEQ ID NO: 63690 - DNA, 22 bp, synthetic construct
  misc_feature 1..22: note = chemically synthesized
  source 1..22: mol_type = other DNA
agagaggaccccacgttacttg

SEQ ID NO: 63691 - DNA, 22 bp, synthetic construct
  misc_feature 1..22: note = chemically synthesized
  source 1..22: mol_type = other DNA
cttgcctttatccccgcacaga

SEQ ID NO: 63692 - DNA, 22 bp, synthetic construct
  misc_feature 1..22: note = chemically synthesized
  source 1..22: mol_type = other DNA
gcctttatccccgcacagagca

SEQ ID NO: 63693 - DNA, 22 bp, synthetic construct
  misc_feature 1..22: note = chemically synthesized
  source 1..22: mol_type = other DNA
cctttatccccgcacagagcac

SEQ ID NO: 63694 - DNA, 22 bp, synthetic construct
  misc_feature 1..22: note = chemically synthesized
  source 1..22: mol_type = other DNA
tatccccgcacagagcacttca

SEQ ID NO: 63695 - DNA, 22 bp, synthetic construct
  misc_feature 1..22: note = chemically synthesized
  source 1..22: mol_type = other DNA
atccccgcacagagcacttcac

SEQ ID NO: 63696 - DNA, 22 bp, synthetic construct
  misc_feature 1..22: note = chemically synthesized
  source 1..22: mol_type = other DNA
tccccgcacagagcacttcaca

SEQ ID NO: 63697 - DNA, 22 bp, synthetic construct
  misc_feature 1..22: note = chemically synthesized
  source 1..22: mol_type = other DNA
cacaggctgtgcaaggtaatgc

SEQ ID NO: 63698 - DNA, 22 bp, synthetic construct
  misc_feature 1..22: note = chemically synthesized
  source 1..22: mol_type = other DNA
acaggctgtgcaaggtaatgct

SEQ ID NO: 63699 - DNA, 22 bp, synthetic construct
  misc_feature 1..22: note = chemically synthesized
  source 1..22: mol_type = other DNA
tgcaaggtaatgctccactgag

SEQ ID NO: 63700 - DNA, 22 bp, synthetic construct
  misc_feature 1..22: note = chemically synthesized
  source 1..22: mol_type = other DNA
cactgaggacacattctcgcct

SEQ ID NO: 63701 - DNA, 22 bp, synthetic construct
  misc_feature 1..22: note = chemically synthesized
  source 1..22: mol_type = other DNA
aggacacattctcgcctatggg

SEQ ID NO: 63702 - DNA, 22 bp, synthetic construct
  misc_feature 1..22: note = chemically synthesized
  source 1..22: mol_type = other DNA
tcgcctatgggaactctggagg

SEQ ID NO: 63703 - DNA, 22 bp, synthetic construct
  misc_feature 1..22: note = chemically synthesized
  source 1..22: mol_type = other DNA
gcctatgggaactctggaggca

SEQ ID NO: 63704 - DNA, 22 bp, synthetic construct
  misc_feature 1..22: note = chemically synthesized
  source 1..22: mol_type = other DNA
tgggaactctggaggcagggct

SEQ ID NO: 63705 - DNA, 22 bp, synthetic construct
  misc_feature 1..22: note = chemically synthesized
  source 1..22: mol_type = other DNA
tggaggcagggctttgtggagg

SEQ ID NO: 63706 - DNA, 22 bp, synthetic construct
  misc_feature 1..22: note = chemically synthesized
  source 1..22: mol_type = other DNA
gaggcagggctttgtggagggg

SEQ ID NO: 63707 - DNA, 22 bp, synthetic construct
  misc_feature 1..22: note = chemically synthesized
  source 1..22: mol_type = other DNA
tgtggaggggctgccacaggct

SEQ ID NO: 63708 - DNA, 22 bp, synthetic construct
  misc_feature 1..22: note = chemically synthesized
  source 1..22: mol_type = other DNA
gtggaggggctgccacaggctt

SEQ ID NO: 63709 - DNA, 22 bp, synthetic construct
  misc_feature 1..22: note = chemically synthesized
  source 1..22: mol_type = other DNA
tggaggggctgccacaggctta

SEQ ID NO: 63710 - DNA, 22 bp, synthetic construct
  misc_feature 1..22: note = chemically synthesized
  source 1..22: mol_type = other DNA
ccacaggcttatgttgcctcct

SEQ ID NO: 63711 - DNA, 22 bp, synthetic construct
  misc_feature 1..22: note = chemically synthesized
  source 1..22: mol_type = other DNA
atgttgcctcctaggatttccc

SEQ ID NO: 63712 - DNA, 22 bp, synthetic construct
  misc_feature 1..22: note = chemically synthesized
  source 1..22: mol_type = other DNA
tgttgcctcctaggatttccca

SEQ ID NO: 63713 - DNA, 22 bp, synthetic construct
  misc_feature 1..22: note = chemically synthesized
  source 1..22: mol_type = other DNA
cctcctaggatttcccatgggc

SEQ ID NO: 63714 - DNA, 22 bp, synthetic construct
  misc_feature 1..22: note = chemically synthesized
  source 1..22: mol_type = other DNA
ctaggatttcccatgggccaag

SEQ ID NO: 63715 - DNA, 22 bp, synthetic construct
  misc_feature 1..22: note = chemically synthesized
  source 1..22: mol_type = other DNA
ggatttcccatgggccaagagg

SEQ ID NO: 63716 - DNA, 22 bp, synthetic construct
  misc_feature 1..22: note = chemically synthesized
  source 1..22: mol_type = other DNA
cccatgggccaagagggaaaat

SEQ ID NO: 63717 - DNA, 22 bp, synthetic construct
  misc_feature 1..22: note = chemically synthesized
  source 1..22: mol_type = other DNA
ccatgggccaagagggaaaatg

SEQ ID NO: 63718 - DNA, 22 bp, synthetic construct
  misc_feature 1..22: note = chemically synthesized
  source 1..22: mol_type = other DNA
gggtggccatccctggtggccc

SEQ ID NO: 63719 - DNA, 22 bp, synthetic construct
  misc_feature 1..22: note = chemically synthesized
  source 1..22: mol_type = other DNA
gtggcccctcctcatgcatcct

SEQ ID NO: 63720 - DNA, 22 bp, synthetic construct
  misc_feature 1..22: note = chemically synthesized
  source 1..22: mol_type = other DNA
ctcatgcatcctggagagctgt

SEQ ID NO: 63721 - DNA, 22 bp, synthetic construct
  misc_feature 1..22: note = chemically synthesized
  source 1..22: mol_type = other DNA
atgcatcctggagagctgtggg

SEQ ID NO: 63722 - DNA, 22 bp, synthetic construct
  misc_feature 1..22: note = chemically synthesized
  source 1..22: mol_type = other DNA
gagagctgtgggcctcctctcc

SEQ ID NO: 63723 - DNA, 22 bp, synthetic construct
  misc_feature 1..22: note = chemically synthesized
  source 1..22: mol_type = other DNA
tgggcctcctctccacaggctt

SEQ ID NO: 63724 - DNA, 22 bp, synthetic construct
  misc_feature 1..22: note = chemically synthesized
  source 1..22: mol_type = other DNA
ctctccacaggctttgtggatc

SEQ ID NO: 63725 - DNA, 22 bp, synthetic construct
  misc_feature 1..22: note = chemically synthesized
  source 1..22: mol_type = other DNA
tccacaggctttgtggatcttc

SEQ ID NO: 63726 - DNA, 22 bp, synthetic construct
  misc_feature 1..22: note = chemically synthesized
  source 1..22: mol_type = other DNA
cacaggctttgtggatcttctt

SEQ ID NO: 63727 - DNA, 22 bp, synthetic construct
  misc_feature 1..22: note = chemically synthesized
  source 1..22: mol_type = other DNA
tgtggatcttcttcagagccag

SEQ ID NO: 63728 - DNA, 22 bp, synthetic construct
  misc_feature 1..22: note = chemically synthesized
  source 1..22: mol_type = other DNA
gtggatcttcttcagagccagt

SEQ ID NO: 63729 - DNA, 22 bp, synthetic construct
  misc_feature 1..22: note = chemically synthesized
  source 1..22: mol_type = other DNA
tggatcttcttcagagccagtg

SEQ ID NO: 63730 - DNA, 22 bp, synthetic construct
  misc_feature 1..22: note = chemically synthesized
  source 1..22: mol_type = other DNA
cttcagagccagtgagtcagcc

SEQ ID NO: 63731 - DNA, 22 bp, synthetic construct
  misc_feature 1..22: note = chemically synthesized
  source 1..22: mol_type = other DNA
ttcagagccagtgagtcagcct

SEQ ID NO: 63732 - DNA, 22 bp, synthetic construct
  misc_feature 1..22: note = chemically synthesized
  source 1..22: mol_type = other DNA
cagagccagtgagtcagccttg

SEQ ID NO: 63733 - DNA, 22 bp, synthetic construct
  misc_feature 1..22: note = chemically synthesized
  source 1..22: mol_type = other DNA
agagccagtgagtcagccttgc

SEQ ID NO: 63734 - DNA, 22 bp, synthetic construct
  misc_feature 1..22: note = chemically synthesized
  source 1..22: mol_type = other DNA
gctgtggtggcccacaaggagt

SEQ ID NO: 63735 - DNA, 22 bp, synthetic construct
  misc_feature 1..22: note = chemically synthesized
  source 1..22: mol_type = other DNA
ctgtggtggcccacaaggagtg

SEQ ID NO: 63736 - DNA, 22 bp, synthetic construct
  misc_feature 1..22: note = chemically synthesized
  source 1..22: mol_type = other DNA
tggtggcccacaaggagtggag

SEQ ID NO: 63737 - DNA, 22 bp, synthetic construct
  misc_feature 1..22: note = chemically synthesized
  source 1..22: mol_type = other DNA
ggggacagggcaaaagctcatg

SEQ ID NO: 63738 - DNA, 22 bp, synthetic construct
  misc_feature 1..22: note = chemically synthesized
  source 1..22: mol_type = other DNA
gggacagggcaaaagctcatgt

SEQ ID NO: 63739 - DNA, 22 bp, synthetic construct
  misc_feature 1..22: note = chemically synthesized
  source 1..22: mol_type = other DNA
atgtgatagggatgctgtctct

SEQ ID NO: 63740 - DNA, 22 bp, synthetic construct
  misc_feature 1..22: note = chemically synthesized
  source 1..22: mol_type = other DNA
tctctgcaaccacatggatttt

SEQ ID NO: 63741 - DNA, 22 bp, synthetic construct
  misc_feature 1..22: note = chemically synthesized
  source 1..22: mol_type = other DNA
tgcaaccacatggattttaata

SEQ ID NO: 63742 - DNA, 22 bp, synthetic construct
  misc_feature 1..22: note = chemically synthesized
  source 1..22: mol_type = other DNA
caaccacatggattttaatagt

SEQ ID NO: 63743 - DNA, 22 bp, synthetic construct
  misc_feature 1..22: note = chemically synthesized
  source 1..22: mol_type = other DNA
taatagttacccatggctggct

SEQ ID NO: 63744 - DNA, 22 bp, synthetic construct
  misc_feature 1..22: note = chemically synthesized
  source 1..22: mol_type = other DNA
aatagttacccatggctggctt

SEQ ID NO: 63745 - DNA, 22 bp, synthetic construct
  misc_feature 1..22: note = chemically synthesized
  source 1..22: mol_type = other DNA
atagttacccatggctggcttc

SEQ ID NO: 63746 - DNA, 22 bp, synthetic construct
  misc_feature 1..22: note = chemically synthesized
  source 1..22: mol_type = other DNA
cccatggctggcttcagctttt

SEQ ID NO: 63747 - DNA, 22 bp, synthetic construct
  misc_feature 1..22: note = chemically synthesized
  source 1..22: mol_type = other DNA
gcttcagctttttttgtgaatg

SEQ ID NO: 63748 - DNA, 22 bp, synthetic construct
  misc_feature 1..22: note = chemically synthesized
  source 1..22: mol_type = other DNA
cagctttttttgtgaatggcag

SEQ ID NO: 63749 - DNA, 22 bp, synthetic construct
  misc_feature 1..22: note = chemically synthesized
  source 1..22: mol_type = other DNA
agctttttttgtgaatggcagc

SEQ ID NO: 63750 - DNA, 22 bp, synthetic construct
  misc_feature 1..22: note = chemically synthesized
  source 1..22: mol_type = other DNA
tttttgtgaatggcagccaaaa

SEQ ID NO: 63751 - DNA, 22 bp, synthetic construct
  misc_feature 1..22: note = chemically synthesized
  source 1..22: mol_type = other DNA
ttttgtgaatggcagccaaaaa

SEQ ID NO: 63752 - DNA, 22 bp, synthetic construct
  misc_feature 1..22: note = chemically synthesized
  source 1..22: mol_type = other DNA
tttgtgaatggcagccaaaaag

SEQ ID NO: 63753 - DNA, 22 bp, synthetic construct
  misc_feature 1..22: note = chemically synthesized
  source 1..22: mol_type = other DNA
ttgtgaatggcagccaaaaagt

SEQ ID NO: 63754 - DNA, 22 bp, synthetic construct
  misc_feature 1..22: note = chemically synthesized
  source 1..22: mol_type = other DNA
tgtgaatggcagccaaaaagtg

SEQ ID NO: 63755 - DNA, 22 bp, synthetic construct
  misc_feature 1..22: note = chemically synthesized
  source 1..22: mol_type = other DNA
gtgaatggcagccaaaaagtgt

SEQ ID NO: 63756 - DNA, 22 bp, synthetic construct
  misc_feature 1..22: note = chemically synthesized
  source 1..22: mol_type = other DNA
tgaatggcagccaaaaagtgtg

SEQ ID NO: 63757 - DNA, 22 bp, synthetic construct
  misc_feature 1..22: note = chemically synthesized
  source 1..22: mol_type = other DNA
agtggagacagaggggagactg

SEQ ID NO: 63758 - DNA, 22 bp, synthetic construct
  misc_feature 1..22: note = chemically synthesized
  source 1..22: mol_type = other DNA
ttgaatttgtggagtttttagt

SEQ ID NO: 63759 - DNA, 22 bp, synthetic construct
  misc_feature 1..22: note = chemically synthesized
  source 1..22: mol_type = other DNA
aatttgtggagtttttagttct

SEQ ID NO: 63760 - DNA, 22 bp, synthetic construct
  misc_feature 1..22: note = chemically synthesized
  source 1..22: mol_type = other DNA
gtggagtttttagttcttccta

SEQ ID NO: 63761 - DNA, 22 bp, synthetic construct
  misc_feature 1..22: note = chemically synthesized
  source 1..22: mol_type = other DNA
tggagtttttagttcttcctaa

SEQ ID NO: 63762 - DNA, 22 bp, synthetic construct
  misc_feature 1..22: note = chemically synthesized
  source 1..22: mol_type = other DNA
ttagttcttcctaaacagagag

SEQ ID NO: 63763 - DNA, 22 bp, synthetic construct
  misc_feature 1..22: note = chemically synthesized
  source 1..22: mol_type = other DNA
tagttcttcctaaacagagagc

SEQ ID NO: 63764 - DNA, 22 bp, synthetic construct
  misc_feature 1..22: note = chemically synthesized
  source 1..22: mol_type = other DNA
agttcttcctaaacagagagca

SEQ ID NO: 63765 - DNA, 22 bp, synthetic construct
  misc_feature 1..22: note = chemically synthesized
  source 1..22: mol_type = other DNA
gttcttcctaaacagagagcaa

SEQ ID NO: 63766 - DNA, 22 bp, synthetic construct
  misc_feature 1..22: note = chemically synthesized
  source 1..22: mol_type = other DNA
ttcctaaacagagagcaacaga

SEQ ID NO: 63767 - DNA, 22 bp, synthetic construct
  misc_feature 1..22: note = chemically synthesized
  source 1..22: mol_type = other DNA
cctaaacagagagcaacagaca

SEQ ID NO: 63768 - DNA, 22 bp, synthetic construct
  misc_feature 1..22: note = chemically synthesized
  source 1..22: mol_type = other DNA
ctaaacagagagcaacagacaa

SEQ ID NO: 63769 - DNA, 22 bp, synthetic construct
  misc_feature 1..22: note = chemically synthesized
  source 1..22: mol_type = other DNA
aacagagagcaacagacaagag

SEQ ID NO: 63770 - DNA, 22 bp, synthetic construct
  misc_feature 1..22: note = chemically synthesized
  source 1..22: mol_type = other DNA
cagacaaattaattcttttcgt

SEQ ID NO: 63771 - DNA, 22 bp, synthetic construct
  misc_feature 1..22: note = chemically synthesized
  source 1..22: mol_type = other DNA
attcttttcgttaatttaccct

SEQ ID NO: 63772 - DNA, 22 bp, synthetic construct
  misc_feature 1..22: note = chemically synthesized
  source 1..22: mol_type = other DNA
ttttcgttaatttaccctcaac

SEQ ID NO: 63773 - DNA, 22 bp, synthetic construct
  misc_feature 1..22: note = chemically synthesized
  source 1..22: mol_type = other DNA
ttcgttaatttaccctcaacta

SEQ ID NO: 63774 - DNA, 22 bp, synthetic construct
  misc_feature 1..22: note = chemically synthesized
  source 1..22: mol_type = other DNA
tcgttaatttaccctcaactac

SEQ ID NO: 63775 - DNA, 22 bp, synthetic construct
  misc_feature 1..22: note = chemically synthesized
  source 1..22: mol_type = other DNA
cgttaatttaccctcaactact

SEQ ID NO: 63776 - DNA, 22 bp, synthetic construct
  misc_feature 1..22: note = chemically synthesized
  source 1..22: mol_type = other DNA
gttaatttaccctcaactactg

SEQ ID NO: 63777 - DNA, 22 bp, synthetic construct
  misc_feature 1..22: note = chemically synthesized
  source 1..22: mol_type = other DNA
atttaccctcaactactggcca

SEQ ID NO: 63778 - DNA, 22 bp, synthetic construct
  misc_feature 1..22: note = chemically synthesized
  source 1..22: mol_type = other DNA
accctcaactactggccaagaa

SEQ ID NO: 63779 - DNA, 22 bp, synthetic construct
  misc_feature 1..22: note = chemically synthesized
  source 1..22: mol_type = other DNA
ccctcaactactggccaagaag

SEQ ID NO: 63780 - DNA, 22 bp, synthetic construct
  misc_feature 1..22: note = chemically synthesized
  source 1..22: mol_type = other DNA
aactactggccaagaaggggtg

SEQ ID NO: 63781 - DNA, 22 bp, synthetic construct
  misc_feature 1..22: note = chemically synthesized
  source 1..22: mol_type = other DNA
ctggccaagaaggggtgtaact

SEQ ID NO: 63782 - DNA, 22 bp, synthetic construct
  misc_feature 1..22: note = chemically synthesized
  source 1..22: mol_type = other DNA
gccaagaaggggtgtaactcag

SEQ ID NO: 63783 - DNA, 22 bp, synthetic construct
  misc_feature 1..22: note = chemically synthesized
  source 1..22: mol_type = other DNA
agaatgttttcttcttttgtgc

SEQ ID NO: 63784 - DNA, 22 bp, synthetic construct
  misc_feature 1..22: note = chemically synthesized
  source 1..22: mol_type = other DNA
tcttcttttgtgccctgagtag

SEQ ID NO: 63785 - DNA, 22 bp, synthetic construct
  misc_feature 1..22: note = chemically synthesized
  source 1..22: mol_type = other DNA
cttcttttgtgccctgagtagc

SEQ ID NO: 63786 - DNA, 22 bp, synthetic construct
  misc_feature 1..22: note = chemically synthesized
  source 1..22: mol_type = other DNA
ttcttttgtgccctgagtagca

SEQ ID NO: 63787 - DNA, 22 bp, synthetic construct
  misc_feature 1..22: note = chemically synthesized
  source 1..22: mol_type = other DNA
cttttgtgccctgagtagcaga

SEQ ID NO: 63788 - DNA, 22 bp, synthetic construct
  misc_feature 1..22: note = chemically synthesized
  source 1..22: mol_type = other DNA
ttttgtgccctgagtagcagac

SEQ ID NO: 63789 - DNA, 22 bp, synthetic construct
  misc_feature 1..22: note = chemically synthesized
  source 1..22: mol_type = other DNA
ttgtgccctgagtagcagaccc

SEQ ID NO: 63790 - DNA, 22 bp, synthetic construct
  misc_feature 1..22: note = chemically synthesized
  source 1..22: mol_type = other DNA
tgtgccctgagtagcagaccca

SEQ ID NO: 63791 - DNA, 22 bp, synthetic construct
  misc_feature 1..22: note = chemically synthesized
  source 1..22: mol_type = other DNA
gtgccctgagtagcagacccag

SEQ ID NO: 63792 - DNA, 22 bp, synthetic construct
  misc_feature 1..22: note = chemically synthesized
  source 1..22: mol_type = other DNA
tgccctgagtagcagacccaga

SEQ ID NO: 63793 - DNA, 22 bp, synthetic construct
  misc_feature 1..22: note = chemically synthesized
  source 1..22: mol_type = other DNA
agtagcagacccagagtctgga

SEQ ID NO: 63794 - DNA, 22 bp, synthetic construct
  misc_feature 1..22: note = chemically synthesized
  source 1..22: mol_type = other DNA
gagacccagattctaggcctgg

SEQ ID NO: 63795 - DNA, 22 bp, synthetic construct
  misc_feature 1..22: note = chemically synthesized
  source 1..22: mol_type = other DNA
taggcctggcttggccaacgac

SEQ ID NO: 63796 - DNA, 22 bp, synthetic construct
  misc_feature 1..22: note = chemically synthesized
  source 1..22: mol_type = other DNA
ggcctggcttggccaacgacaa

SEQ ID NO: 63797 - DNA, 22 bp, synthetic construct
  misc_feature 1..22: note = chemically synthesized
  source 1..22: mol_type = other DNA
gcttggccaacgacaagcaggg

SEQ ID NO: 63798 - DNA, 22 bp, synthetic construct
  misc_feature 1..22: note = chemically synthesized
  source 1..22: mol_type = other DNA
ggccaacgacaagcagggtgac

SEQ ID NO: 63799 - DNA, 22 bp, synthetic construct
  misc_feature 1..22: note = chemically synthesized
  source 1..22: mol_type = other DNA
gccaacgacaagcagggtgacc

SEQ ID NO: 63800 - DNA, 22 bp, synthetic construct
  misc_feature 1..22: note = chemically synthesized
  source 1..22: mol_type = other DNA
gggttaaaaaaaaaaaaaggca

SEQ ID NO: 63801 - DNA, 22 bp, synthetic construct
  misc_feature 1..22: note = chemically synthesized
  source 1..22: mol_type = other DNA
ggttaaaaaaaaaaaaaggcat

SEQ ID NO: 63802 - DNA, 22 bp, synthetic construct
  misc_feature 1..22: note = chemically synthesized
  source 1..22: mol_type = other DNA
aaaaaaaaaaaaggcatcattc

SEQ ID NO: 63803 - DNA, 22 bp, synthetic construct
  misc_feature 1..22: note = chemically synthesized
  source 1..22: mol_type = other DNA
tctgagtctcactccctcttct

SEQ ID NO: 63804 - DNA, 22 bp, synthetic construct
  misc_feature 1..22: note = chemically synthesized
  source 1..22: mol_type = other DNA
tgagtctcactccctcttctca

SEQ ID NO: 63805 - DNA, 22 bp, synthetic construct
  misc_feature 1..22: note = chemically synthesized
  source 1..22: mol_type = other DNA
agtctcactccctcttctcaaa

SEQ ID NO: 63806 - DNA, 22 bp, synthetic construct
  misc_feature 1..22: note = chemically synthesized
  source 1..22: mol_type = other DNA
actccctcttctcaaaaagatg

SEQ ID NO: 63807 - DNA, 22 bp, synthetic construct
  misc_feature 1..22: note = chemically synthesized
  source 1..22: mol_type = other DNA
cctcttctcaaaaagatggcaa

SEQ ID NO: 63808 - DNA, 22 bp, synthetic construct
  misc_feature 1..22: note = chemically synthesized
  source 1..22: mol_type = other DNA
ttctcaaaaagatggcaattcc

SEQ ID NO: 63809 - DNA, 22 bp, synthetic construct
  misc_feature 1..22: note = chemically synthesized
  source 1..22: mol_type = other DNA
ctcaaaaagatggcaattcctc

SEQ ID NO: 63810 - DNA, 22 bp, synthetic construct
  misc_feature 1..22: note = chemically synthesized
  source 1..22: mol_type = other DNA
tcaaaaagatggcaattcctcc

SEQ ID NO: 63811 - DNA, 22 bp, synthetic construct
  misc_feature 1..22: note = chemically synthesized
  source 1..22: mol_type = other DNA
aaaaagatggcaattcctcccc

SEQ ID NO: 63812 - DNA, 22 bp, synthetic construct
  misc_feature 1..22: note = chemically synthesized
  source 1..22: mol_type = other DNA
ctcccccgctggttttccatag

SEQ ID NO: 63813 - DNA, 22 bp, synthetic construct
  misc_feature 1..22: note = chemically synthesized
  source 1..22: mol_type = other DNA
ccccgctggttttccatagttg

SEQ ID NO: 63814 - DNA, 22 bp, synthetic construct
  misc_feature 1..22: note = chemically synthesized
  source 1..22: mol_type = other DNA
gttttccatagttgaggtagca

SEQ ID NO: 63815 - DNA, 22 bp, synthetic construct
  misc_feature 1..22: note = chemically synthesized
  source 1..22: mol_type = other DNA
tccatagttgaggtagcaagcc

SEQ ID NO: 63816 - DNA, 22 bp, synthetic construct
  misc_feature 1..22: note = chemically synthesized
  source 1..22: mol_type = other DNA
ccatagttgaggtagcaagcca

SEQ ID NO: 63817 - DNA, 22 bp, synthetic construct
  misc_feature 1..22: note = chemically synthesized
  source 1..22: mol_type = other DNA
catagttgaggtagcaagccaa

SEQ ID NO: 63818 - DNA, 22 bp, synthetic construct
  misc_feature 1..22: note = chemically synthesized
  source 1..22: mol_type = other DNA
aggtagcaagccaatgtgttgg

SEQ ID NO: 63819 - DNA, 22 bp, synthetic construct
  misc_feature 1..22: note = chemically synthesized
  source 1..22: mol_type = other DNA
gggtagctgaaaacgccctgtg

SEQ ID NO: 63820 - DNA, 22 bp, synthetic construct
  misc_feature 1..22: note = chemically synthesized
  source 1..22: mol_type = other DNA
aaaacgccctgtgcatactgag

SEQ ID NO: 63821 - DNA, 22 bp, synthetic construct
  misc_feature 1..22: note = chemically synthesized
  source 1..22: mol_type = other DNA
tgcatactgaggcttatgttcc

SEQ ID NO: 63822 - DNA, 22 bp, synthetic construct
  misc_feature 1..22: note = chemically synthesized
  source 1..22: mol_type = other DNA
aggcttatgttccatggggggc

SEQ ID NO: 63823 - DNA, 22 bp, synthetic construct
  misc_feature 1..22: note = chemically synthesized
  source 1..22: mol_type = other DNA
atgttccatggggggccagggg

SEQ ID NO: 63824 - DNA, 22 bp, synthetic construct
  misc_feature 1..22: note = chemically synthesized
  source 1..22: mol_type = other DNA
tgttccatggggggccaggggc

SEQ ID NO: 63825 - DNA, 22 bp, synthetic construct
  misc_feature 1..22: note = chemically synthesized
  source 1..22: mol_type = other DNA
catggggggccaggggccagga

SEQ ID NO: 63826 - DNA, 22 bp, synthetic construct
  misc_feature 1..22: note = chemically synthesized
  source 1..22: mol_type = other DNA
tcatctccagctgggaggtgat

SEQ ID NO: 63827 - DNA, 22 bp, synthetic construct
  misc_feature 1..22: note = chemically synthesized
  source 1..22: mol_type = other DNA
cagctgggaggtgatggccatg

SEQ ID NO: 63828 - DNA, 22 bp, synthetic construct
  misc_feature 1..22: note = chemically synthesized
  source 1..22: mol_type = other DNA
ggaggtgatggccatgcctgca

SEQ ID NO: 63829 - DNA, 22 bp, synthetic construct
  misc_feature 1..22: note = chemically synthesized
  source 1..22: mol_type = other DNA
cacccctctggccagcagaggg

SEQ ID NO: 63830 - DNA, 22 bp, synthetic construct
  misc_feature 1..22: note = chemically synthesized
  source 1..22: mol_type = other DNA
tggccagcagagggtggtcagt

SEQ ID NO: 63831 - DNA, 22 bp, synthetic construct
  misc_feature 1..22: note = chemically synthesized
  source 1..22: mol_type = other DNA
gccagcagagggtggtcagtag

SEQ ID NO: 63832 - DNA, 22 bp, synthetic construct
  misc_feature 1..22: note = chemically synthesized
  source 1..22: mol_type = other DNA
ggaggccattagggcaaccttc

SEQ ID NO: 63833 - DNA, 22 bp, synthetic construct
  misc_feature 1..22: note = chemically synthesized
  source 1..22: mol_type = other DNA
gggcaaccttctattggctcag

SEQ ID NO: 63834 - DNA, 22 bp, synthetic construct
  misc_feature 1..22: note = chemically synthesized
  source 1..22: mol_type = other DNA
ctattggctcagactcagaatg

SEQ ID NO: 63835 - DNA, 22 bp, synthetic construct
  misc_feature 1..22: note = chemically synthesized
  source 1..22: mol_type = other DNA
tattggctcagactcagaatgc

SEQ ID NO: 63836 - DNA, 22 bp, synthetic construct
  misc_feature 1..22: note = chemically synthesized
  source 1..22: mol_type = other DNA
ttggctcagactcagaatgcag

SEQ ID NO: 63837 - DNA, 22 bp, synthetic construct
  misc_feature 1..22: note = chemically synthesized
  source 1..22: mol_type = other DNA
gctcagactcagaatgcagtag

SEQ ID NO: 63838 - DNA, 22 bp, synthetic construct
  misc_feature 1..22: note = chemically synthesized
  source 1..22: mol_type = other DNA
agactcagaatgcagtagaact

SEQ ID NO: 63839 - DNA, 22 bp, synthetic construct
  misc_feature 1..22: note = chemically synthesized
  source 1..22: mol_type = other DNA
agaatgcagtagaacttgtgcc

SEQ ID NO: 63840 - DNA, 22 bp, synthetic construct
  misc_feature 1..22: note = chemically synthesized
  source 1..22: mol_type = other DNA
gtgccctgtagtgttcatggac

SEQ ID NO: 63841 - DNA, 22 bp, synthetic construct
  misc_feature 1..22: note = chemically synthesized
  source 1..22: mol_type = other DNA
tgccctgtagtgttcatggaca

SEQ ID NO: 63842 - DNA, 22 bp, synthetic construct
  misc_feature 1..22: note = chemically synthesized
  source 1..22: mol_type = other DNA
tagtgttcatggacaggagtga

SEQ ID NO: 63843 - DNA, 22 bp, synthetic construct
  misc_feature 1..22: note = chemically synthesized
  source 1..22: mol_type = other DNA
atggacaggagtgagaggagga

SEQ ID NO: 63844 - DNA, 22 bp, synthetic construct
  misc_feature 1..22: note = chemically synthesized
  source 1..22: mol_type = other DNA
aggggatgtggctgtcaaggcc

SEQ ID NO: 63845 - DNA, 22 bp, synthetic construct
  misc_feature 1..22: note = chemically synthesized
  source 1..22: mol_type = other DNA
tcaaggcctttctaggggcgat

SEQ ID NO: 63846 - DNA, 22 bp, synthetic construct
  misc_feature 1..22: note = chemically synthesized
  source 1..22: mol_type = other DNA
tctaggggcgatgctgtctctc

SEQ ID NO: 63847 - DNA, 22 bp, synthetic construct
  misc_feature 1..22: note = chemically synthesized
  source 1..22: mol_type = other DNA
ctaggggcgatgctgtctctcc

SEQ ID NO: 63848 - DNA, 22 bp, synthetic construct
  misc_feature 1..22: note = chemically synthesized
  source 1..22: mol_type = other DNA
taggggcgatgctgtctctccc

SEQ ID NO: 63849 - DNA, 22 bp, synthetic construct
  misc_feature 1..22: note = chemically synthesized
  source 1..22: mol_type = other DNA
ggggcgatgctgtctctccctc

SEQ ID NO: 63850 - DNA, 22 bp, synthetic construct
  misc_feature 1..22: note = chemically synthesized
  source 1..22: mol_type = other DNA
tctctccctcagcatagggagt

SEQ ID NO: 63851 - DNA, 22 bp, synthetic construct
  misc_feature 1..22: note = chemically synthesized
  source 1..22: mol_type = other DNA
tccctcagcatagggagtgggc

SEQ ID NO: 63852 - DNA, 22 bp, synthetic construct
  misc_feature 1..22: note = chemically synthesized
  source 1..22: mol_type = other DNA
cctcagcatagggagtgggccc

SEQ ID NO: 63853 - DNA, 22 bp, synthetic construct
  misc_feature 1..22: note = chemically synthesized
  source 1..22: mol_type = other DNA
agcatagggagtgggcccttcc

SEQ ID NO: 63854 - DNA, 22 bp, synthetic construct
  misc_feature 1..22: note = chemically synthesized
  source 1..22: mol_type = other DNA
ccacctctggcctctctccccc

SEQ ID NO: 63855 - DNA, 22 bp, synthetic construct
  misc_feature 1..22: note = chemically synthesized
  source 1..22: mol_type = other DNA
cacctctggcctctctccccca

SEQ ID NO: 63856 - DNA, 22 bp, synthetic construct
  misc_feature 1..22: note = chemically synthesized
  source 1..22: mol_type = other DNA
tggcctctctcccccagggctg

SEQ ID NO: 63857 - DNA, 22 bp, synthetic construct
  misc_feature 1..22: note = chemically synthesized
  source 1..22: mol_type = other DNA
gcctctctcccccagggctgtg

SEQ ID NO: 63858 - DNA, 22 bp, synthetic construct
  misc_feature 1..22: note = chemically synthesized
  source 1..22: mol_type = other DNA
tctcccccagggctgtgtctgg

SEQ ID NO: 63859 - DNA, 22 bp, synthetic construct
  misc_feature 1..22: note = chemically synthesized
  source 1..22: mol_type = other DNA
tcccccagggctgtgtctggct

SEQ ID NO: 63860 - DNA, 22 bp, synthetic construct
  misc_feature 1..22: note = chemically synthesized
  source 1..22: mol_type = other DNA
ccccagggctgtgtctggctgt

SEQ ID NO: 63861 - DNA, 22 bp, synthetic construct
  misc_feature 1..22: note = chemically synthesized
  source 1..22: mol_type = other DNA
tgtctggctgtccctgataaaa

SEQ ID NO: 63862 - DNA, 22 bp, synthetic construct
  misc_feature 1..22: note = chemically synthesized
  source 1..22: mol_type = other DNA
gctgtccctgataaaactgtga

SEQ ID NO: 63863 - DNA, 22 bp, synthetic construct
  misc_feature 1..22: note = chemically synthesized
  source 1..22: mol_type = other DNA
tccctgataaaactgtgagatg

SEQ ID NO: 63864 - DNA, 22 bp, synthetic construct
  misc_feature 1..22: note = chemically synthesized
  source 1..22: mol_type = other DNA
ataaaactgtgagatggtgtgc

SEQ ID NO: 63865 - DNA, 22 bp, synthetic construct
  misc_feature 1..22: note = chemically synthesized
  source 1..22: mol_type = other DNA
tgagatggtgtgcagtgtcgga

SEQ ID NO: 63866 - DNA, 22 bp, synthetic construct
  misc_feature 1..22: note = chemically synthesized
  source 1..22: mol_type = other DNA
agtgccagagtttccgcgacca

SEQ ID NO: 63867 - DNA, 22 bp, synthetic construct
  misc_feature 1..22: note = chemically synthesized
  source 1..22: mol_type = other DNA
ccgcgaccatatgaaaagcgtc

SEQ ID NO: 63868 - DNA, 22 bp, synthetic construct
  misc_feature 1..22: note = chemically synthesized
  source 1..22: mol_type = other DNA
cgcgaccatatgaaaagcgtca

SEQ ID NO: 63869 - DNA, 22 bp, synthetic construct
  misc_feature 1..22: note = chemically synthesized
  source 1..22: mol_type = other DNA
catccgatggtcccagtgttgc

SEQ ID NO: 63870 - DNA, 22 bp, synthetic construct
  misc_feature 1..22: note = chemically synthesized
  source 1..22: mol_type = other DNA
cttgtgtgaagaaagcctccta

SEQ ID NO: 63871 - DNA, 22 bp, synthetic construct
  misc_feature 1..22: note = chemically synthesized
  source 1..22: mol_type = other DNA
gtgtgaagaaagcctcctacct

SEQ ID NO: 63872 - DNA, 22 bp, synthetic construct
  misc_feature 1..22: note = chemically synthesized
  source 1..22: mol_type = other DNA
tgtgaagaaagcctcctacctt

SEQ ID NO: 63873 - DNA, 22 bp, synthetic construct
  misc_feature 1..22: note = chemically synthesized
  source 1..22: mol_type = other DNA
ctaccttgattgcatcagggcc

SEQ ID NO: 63874 - DNA, 22 bp, synthetic construct
  misc_feature 1..22: note = chemically synthesized
  source 1..22: mol_type = other DNA
ccttgattgcatcagggccatt

SEQ ID NO: 63875 - DNA, 22 bp, synthetic construct
  misc_feature 1..22: note = chemically synthesized
  source 1..22: mol_type = other DNA
atgcaatcaaggtaggaggctt

SEQ ID NO: 63876 - DNA, 22 bp, synthetic construct
  misc_feature 1..22: note = chemically synthesized
  source 1..22: mol_type = other DNA
tcttcacacaagcaacactggg

SEQ ID NO: 63877 - DNA, 22 bp, synthetic construct
  misc_feature 1..22: note = chemically synthesized
  source 1..22: mol_type = other DNA
cttcacacaagcaacactggga

SEQ ID NO: 63878 - DNA, 22 bp, synthetic construct
  misc_feature 1..22: note = chemically synthesized
  source 1..22: mol_type = other DNA
ttcacacaagcaacactgggac

SEQ ID NO: 63879 - DNA, 22 bp, synthetic construct
  misc_feature 1..22: note = chemically synthesized
  source 1..22: mol_type = other DNA
cacacaagcaacactgggacca

SEQ ID NO: 63880 - DNA, 22 bp, synthetic construct
  misc_feature 1..22: note = chemically synthesized
  source 1..22: mol_type = other DNA
acacaagcaacactgggaccat

SEQ ID NO: 63881 - DNA, 22 bp, synthetic construct
  misc_feature 1..22: note = chemically synthesized
  source 1..22: mol_type = other DNA
ggaccatcggatggaatgacgc

SEQ ID NO: 63882 - DNA, 22 bp, synthetic construct
  misc_feature 1..22: note = chemically synthesized
  source 1..22: mol_type = other DNA
ttcatatggtcgcggaaactct

SEQ ID NO: 63883 - DNA, 22 bp, synthetic construct
  misc_feature 1..22: note = chemically synthesized
  source 1..22: mol_type = other DNA
tcatatggtcgcggaaactctg

SEQ ID NO: 63884 - DNA, 22 bp, synthetic construct
  misc_feature 1..22: note = chemically synthesized
  source 1..22: mol_type = other DNA
catatggtcgcggaaactctgg

SEQ ID NO: 63885 - DNA, 22 bp, synthetic construct
  misc_feature 1..22: note = chemically synthesized
  source 1..22: mol_type = other DNA
atatggtcgcggaaactctggc

SEQ ID NO: 63886 - DNA, 22 bp, synthetic construct
  misc_feature 1..22: note = chemically synthesized
  source 1..22: mol_type = other DNA
tggcacttagtggcctcatgct

SEQ ID NO: 63887 - DNA, 22 bp, synthetic construct
  misc_feature 1..22: note = chemically synthesized
  source 1..22: mol_type = other DNA
gcacttagtggcctcatgctcc

SEQ ID NO: 63888 - DNA, 22 bp, synthetic construct
  misc_feature 1..22: note = chemically synthesized
  source 1..22: mol_type = other DNA
agtggcctcatgctccgacact

SEQ ID NO: 63889 - DNA, 22 bp, synthetic construct
  misc_feature 1..22: note = chemically synthesized
  source 1..22: mol_type = other DNA
gtggcctcatgctccgacactg

SEQ ID NO: 63890 - DNA, 22 bp, synthetic construct
  misc_feature 1..22: note = chemically synthesized
  source 1..22: mol_type = other DNA
atgctccgacactgcacaccat

SEQ ID NO: 63891 - DNA, 22 bp, synthetic construct
  misc_feature 1..22: note = chemically synthesized
  source 1..22: mol_type = other DNA
cgacactgcacaccatctcaca

SEQ ID NO: 63892 - DNA, 22 bp, synthetic construct
  misc_feature 1..22: note = chemically synthesized
  source 1..22: mol_type = other DNA
cacaccatctcacagttttatc

SEQ ID NO: 63893 - DNA, 22 bp, synthetic construct
  misc_feature 1..22: note = chemically synthesized
  source 1..22: mol_type = other DNA
acagttttatcagggacagcca

SEQ ID NO: 63894 - DNA, 22 bp, synthetic construct
  misc_feature 1..22: note = chemically synthesized
  source 1..22: mol_type = other DNA
tatcagggacagccagacacag

SEQ ID NO: 63895 - DNA, 22 bp, synthetic construct
  misc_feature 1..22: note = chemically synthesized
  source 1..22: mol_type = other DNA
atcagggacagccagacacagc

SEQ ID NO: 63896 - DNA, 22 bp, synthetic construct
  misc_feature 1..22: note = chemically synthesized
  source 1..22: mol_type = other DNA
tcagggacagccagacacagcc

SEQ ID NO: 63897 - DNA, 22 bp, synthetic construct
  misc_feature 1..22: note = chemically synthesized
  source 1..22: mol_type = other DNA
ggggagagaggccagaggtgga

SEQ ID NO: 63898 - DNA, 22 bp, synthetic construct
  misc_feature 1..22: note = chemically synthesized
  source 1..22: mol_type = other DNA
cctatgctgagggagagacagc

SEQ ID NO: 63899 - DNA, 22 bp, synthetic construct
  misc_feature 1..22: note = chemically synthesized
  source 1..22: mol_type = other DNA
tgctgagggagagacagcatcg

SEQ ID NO: 63900 - DNA, 22 bp, synthetic construct
  misc_feature 1..22: note = chemically synthesized
  source 1..22: mol_type = other DNA
agggagagacagcatcgcccct

SEQ ID NO: 63901 - DNA, 22 bp, synthetic construct
  misc_feature 1..22: note = chemically synthesized
  source 1..22: mol_type = other DNA
gaaaggccttgacagccacatc

SEQ ID NO: 63902 - DNA, 22 bp, synthetic construct
  misc_feature 1..22: note = chemically synthesized
  source 1..22: mol_type = other DNA
gacagccacatcccctcagtcc

SEQ ID NO: 63903 - DNA, 22 bp, synthetic construct
  misc_feature 1..22: note = chemically synthesized
  source 1..22: mol_type = other DNA
acagccacatcccctcagtcct

SEQ ID NO: 63904 - DNA, 22 bp, synthetic construct
  misc_feature 1..22: note = chemically synthesized
  source 1..22: mol_type = other DNA
agtcctgtcctcctctcactcc

SEQ ID NO: 63905 - DNA, 22 bp, synthetic construct
  misc_feature 1..22: note = chemically synthesized
  source 1..22: mol_type = other DNA
tcctcctctcactcctgtccat

SEQ ID NO: 63906 - DNA, 22 bp, synthetic construct
  misc_feature 1..22: note = chemically synthesized
  source 1..22: mol_type = other DNA
ctctcactcctgtccatgaaca

SEQ ID NO: 63907 - DNA, 22 bp, synthetic construct
  misc_feature 1..22: note = chemically synthesized
  source 1..22: mol_type = other DNA
tcactcctgtccatgaacacta

SEQ ID NO: 63908 - DNA, 22 bp, synthetic construct
  misc_feature 1..22: note = chemically synthesized
  source 1..22: mol_type = other DNA
actcctgtccatgaacactaca

SEQ ID NO: 63909 - DNA, 22 bp, synthetic construct
  misc_feature 1..22: note = chemically synthesized
  source 1..22: mol_type = other DNA
ctgtccatgaacactacagggc

SEQ ID NO: 63910 - DNA, 22 bp, synthetic construct
  misc_feature 1..22: note = chemically synthesized
  source 1..22: mol_type = other DNA
tccatgaacactacagggcaca

SEQ ID NO: 63911 - DNA, 22 bp, synthetic construct
  misc_feature 1..22: note = chemically synthesized
  source 1..22: mol_type = other DNA
cagggcacaagttctactgcat

SEQ ID NO: 63912 - DNA, 22 bp, synthetic construct
  misc_feature 1..22: note = chemically synthesized
  source 1..22: mol_type = other DNA
tactgcattctgagtctgagcc

SEQ ID NO: 63913 - DNA, 22 bp, synthetic construct
  misc_feature 1..22: note = chemically synthesized
  source 1..22: mol_type = other DNA
ctgcattctgagtctgagccaa

SEQ ID NO: 63914 - DNA, 22 bp, synthetic construct
  misc_feature 1..22: note = chemically synthesized
  source 1..22: mol_type = other DNA
cattctgagtctgagccaatag

SEQ ID NO: 63915 - DNA, 22 bp, synthetic construct
  misc_feature 1..22: note = chemically synthesized
  source 1..22: mol_type = other DNA
tgagtctgagccaatagaaggt

SEQ ID NO: 63916 - DNA, 22 bp, synthetic construct
  misc_feature 1..22: note = chemically synthesized
  source 1..22: mol_type = other DNA
agtctgagccaatagaaggttg

SEQ ID NO: 63917 - DNA, 22 bp, synthetic construct
  misc_feature 1..22: note = chemically synthesized
  source 1..22: mol_type = other DNA
agccaatagaaggttgccctaa

SEQ ID NO: 63918 - DNA, 22 bp, synthetic construct
  misc_feature 1..22: note = chemically synthesized
  source 1..22: mol_type = other DNA
ccctaatggcctcccagtttcc

SEQ ID NO: 63919 - DNA, 22 bp, synthetic construct
  misc_feature 1..22: note = chemically synthesized
  source 1..22: mol_type = other DNA
atggcctcccagtttcctactg

SEQ ID NO: 63920 - DNA, 22 bp, synthetic construct
  misc_feature 1..22: note = chemically synthesized
  source 1..22: mol_type = other DNA
ccagtttcctactgaccaccct

SEQ ID NO: 63921 - DNA, 22 bp, synthetic construct
  misc_feature 1..22: note = chemically synthesized
  source 1..22: mol_type = other DNA
cctactgaccaccctctgctgg

SEQ ID NO: 63922 - DNA, 22 bp, synthetic construct
  misc_feature 1..22: note = chemically synthesized
  source 1..22: mol_type = other DNA
ctactgaccaccctctgctggc

SEQ ID NO: 63923 - DNA, 22 bp, synthetic construct
  misc_feature 1..22: note = chemically synthesized
  source 1..22: mol_type = other DNA
ctgaccaccctctgctggccag

SEQ ID NO: 63924 - DNA, 22 bp, synthetic construct
  misc_feature 1..22: note = chemically synthesized
  source 1..22: mol_type = other DNA
accaccctctgctggccagagg

SEQ ID NO: 63925 - DNA, 22 bp, synthetic construct
  misc_feature 1..22: note = chemically synthesized
  source 1..22: mol_type = other DNA
tgctggccagaggggtgcaggc

SEQ ID NO: 63926 - DNA, 22 bp, synthetic construct
  misc_feature 1..22: note = chemically synthesized
  source 1..22: mol_type = other DNA
ctggccagaggggtgcaggcat

SEQ ID NO: 63927 - DNA, 22 bp, synthetic construct
  misc_feature 1..22: note = chemically synthesized
  source 1..22: mol_type = other DNA
gccagaggggtgcaggcatggc

SEQ ID NO: 63928 - DNA, 22 bp, synthetic construct
  misc_feature 1..22: note = chemically synthesized
  source 1..22: mol_type = other DNA
ccagctggagatgacaatctgc

SEQ ID NO: 63929 - DNA, 22 bp, synthetic construct
  misc_feature 1..22: note = chemically synthesized
  source 1..22: mol_type = other DNA
gagatgacaatctgctcctctg

SEQ ID NO: 63930 - DNA, 22 bp, synthetic construct
  misc_feature 1..22: note = chemically synthesized
  source 1..22: mol_type = other DNA
ctcctctgtatccgccttgtct

SEQ ID NO: 63931 - DNA, 22 bp, synthetic construct
  misc_feature 1..22: note = chemically synthesized
  source 1..22: mol_type = other DNA
ctctgtatccgccttgtctcct

SEQ ID NO: 63932 - DNA, 22 bp, synthetic construct
  misc_feature 1..22: note = chemically synthesized
  source 1..22: mol_type = other DNA
tgtatccgccttgtctcctccc

SEQ ID NO: 63933 - DNA, 22 bp, synthetic construct
  misc_feature 1..22: note = chemically synthesized
  source 1..22: mol_type = other DNA
tatccgccttgtctcctcccat

SEQ ID NO: 63934 - DNA, 22 bp, synthetic construct
  misc_feature 1..22: note = chemically synthesized
  source 1..22: mol_type = other DNA
gtctcctcccatcactgtcctg

SEQ ID NO: 63935 - DNA, 22 bp, synthetic construct
  misc_feature 1..22: note = chemically synthesized
  source 1..22: mol_type = other DNA
tctcctcccatcactgtcctgg

SEQ ID NO: 63936 - DNA, 22 bp, synthetic construct
  misc_feature 1..22: note = chemically synthesized
  source 1..22: mol_type = other DNA
ctcccatcactgtcctggcccc

SEQ ID NO: 63937 - DNA, 22 bp, synthetic construct
  misc_feature 1..22: note = chemically synthesized
  source 1..22: mol_type = other DNA
ccatcactgtcctggcccctgg

SEQ ID NO: 63938 - DNA, 22 bp, synthetic construct
  misc_feature 1..22: note = chemically synthesized
  source 1..22: mol_type = other DNA
tcctggcccctggccccccatg

SEQ ID NO: 63939 - DNA, 22 bp, synthetic construct
  misc_feature 1..22: note = chemically synthesized
  source 1..22: mol_type = other DNA
gcccctggccccccatggaaca

SEQ ID NO: 63940 - DNA, 22 bp, synthetic construct
  misc_feature 1..22: note = chemically synthesized
  source 1..22: mol_type = other DNA
gccccccatggaacataagcct

SEQ ID NO: 63941 - DNA, 22 bp, synthetic construct
  misc_feature 1..22: note = chemically synthesized
  source 1..22: mol_type = other DNA
agtatgcacagggcgttttcag

SEQ ID NO: 63942 - DNA, 22 bp, synthetic construct
  misc_feature 1..22: note = chemically synthesized
  source 1..22: mol_type = other DNA
tcagctaccccaacacattggc

SEQ ID NO: 63943 - DNA, 22 bp, synthetic construct
  misc_feature 1..22: note = chemically synthesized
  source 1..22: mol_type = other DNA
cagctaccccaacacattggct

SEQ ID NO: 63944 - DNA, 22 bp, synthetic construct
  misc_feature 1..22: note = chemically synthesized
  source 1..22: mol_type = other DNA
agctaccccaacacattggctt

SEQ ID NO: 63945 - DNA, 22 bp, synthetic construct
  misc_feature 1..22: note = chemically synthesized
  source 1..22: mol_type = other DNA
ccccaacacattggcttgctac

SEQ ID NO: 63946 - DNA, 22 bp, synthetic construct
  misc_feature 1..22: note = chemically synthesized
  source 1..22: mol_type = other DNA
gcttgctacctcaactatggaa

SEQ ID NO: 63947 - DNA, 22 bp, synthetic construct
  misc_feature 1..22: note = chemically synthesized
  source 1..22: mol_type = other DNA
gctacctcaactatggaaaacc

SEQ ID NO: 63948 - DNA, 22 bp, synthetic construct
  misc_feature 1..22: note = chemically synthesized
  source 1..22: mol_type = other DNA
ctacctcaactatggaaaacca

SEQ ID NO: 63949 - DNA, 22 bp, synthetic construct
  misc_feature 1..22: note = chemically synthesized
  source 1..22: mol_type = other DNA
cctcaactatggaaaaccagcg

SEQ ID NO: 63950 - DNA, 22 bp, synthetic construct
  misc_feature 1..22: note = chemically synthesized
  source 1..22: mol_type = other DNA
aactatggaaaaccagcggggg

SEQ ID NO: 63951 - DNA, 22 bp, synthetic construct
  misc_feature 1..22: note = chemically synthesized
  source 1..22: mol_type = other DNA
tggaaaaccagcgggggaggaa

SEQ ID NO: 63952 - DNA, 22 bp, synthetic construct
  misc_feature 1..22: note = chemically synthesized
  source 1..22: mol_type = other DNA
ccatctttttgagaagagggag

SEQ ID NO: 63953 - DNA, 22 bp, synthetic construct
  misc_feature 1..22: note = chemically synthesized
  source 1..22: mol_type = other DNA
tttgagaagagggagtgagact

SEQ ID NO: 63954 - DNA, 22 bp, synthetic construct
  misc_feature 1..22: note = chemically synthesized
  source 1..22: mol_type = other DNA
ttgagaagagggagtgagactc

SEQ ID NO: 63955 - DNA, 22 bp, synthetic construct
  misc_feature 1..22: note = chemically synthesized
  source 1..22: mol_type = other DNA
tgagaagagggagtgagactca

SEQ ID NO: 63956 - DNA, 22 bp, synthetic construct
  misc_feature 1..22: note = chemically synthesized
  source 1..22: mol_type = other DNA
gagaagagggagtgagactcag

SEQ ID NO: 63957 - DNA, 22 bp, synthetic construct
  misc_feature 1..22: note = chemically synthesized
  source 1..22: mol_type = other DNA
agaagagggagtgagactcaga

SEQ ID NO: 63958 - DNA, 22 bp, synthetic construct
  misc_feature 1..22: note = chemically synthesized
  source 1..22: mol_type = other DNA
agagaatgatgccttttttttt

SEQ ID NO: 63959 - DNA, 22 bp, synthetic construct
  misc_feature 1..22: note = chemically synthesized
  source 1..22: mol_type = other DNA
tttttttttttaacccaaggtc

SEQ ID NO: 63960 - DNA, 22 bp, synthetic construct
  misc_feature 1..22: note = chemically synthesized
  source 1..22: mol_type = other DNA
ttttttttttaacccaaggtca

SEQ ID NO: 63961 - DNA, 22 bp, synthetic construct
  misc_feature 1..22: note = chemically synthesized
  source 1..22: mol_type = other DNA
tttttttttaacccaaggtcac

SEQ ID NO: 63962 - DNA, 22 bp, synthetic construct
  misc_feature 1..22: note = chemically synthesized
  source 1..22: mol_type = other DNA
ttttttttaacccaaggtcacc

SEQ ID NO: 63963 - DNA, 22 bp, synthetic construct
  misc_feature 1..22: note = chemically synthesized
  source 1..22: mol_type = other DNA
tttttttaacccaaggtcaccc

SEQ ID NO: 63964 - DNA, 22 bp, synthetic construct
  misc_feature 1..22: note = chemically synthesized
  source 1..22: mol_type = other DNA
ttttttaacccaaggtcaccct

SEQ ID NO: 63965 - DNA, 22 bp, synthetic construct
  misc_feature 1..22: note = chemically synthesized
  source 1..22: mol_type = other DNA
tttttaacccaaggtcaccctg

SEQ ID NO: 63966 - DNA, 22 bp, synthetic construct
  misc_feature 1..22: note = chemically synthesized
  source 1..22: mol_type = other DNA
ttttaacccaaggtcaccctgc

SEQ ID NO: 63967 - DNA, 22 bp, synthetic construct
  misc_feature 1..22: note = chemically synthesized
  source 1..22: mol_type = other DNA
tttaacccaaggtcaccctgct

SEQ ID NO: 63968 - DNA, 22 bp, synthetic construct
  misc_feature 1..22: note = chemically synthesized
  source 1..22: mol_type = other DNA
ttaacccaaggtcaccctgctt

SEQ ID NO: 63969 - DNA, 22 bp, synthetic construct
  misc_feature 1..22: note = chemically synthesized
  source 1..22: mol_type = other DNA
taacccaaggtcaccctgcttg

SEQ ID NO: 63970 - DNA, 22 bp, synthetic construct
  misc_feature 1..22: note = chemically synthesized
  source 1..22: mol_type = other DNA
aacccaaggtcaccctgcttgt

SEQ ID NO: 63971 - DNA, 22 bp, synthetic construct
  misc_feature 1..22: note = chemically synthesized
  source 1..22: mol_type = other DNA
acccaaggtcaccctgcttgtc

SEQ ID NO: 63972 - DNA, 22 bp, synthetic construct
  misc_feature 1..22: note = chemically synthesized
  source 1..22: mol_type = other DNA
cttgtcgttggccaagccaggc

SEQ ID NO: 63973 - DNA, 22 bp, synthetic construct
  misc_feature 1..22: note = chemically synthesized
  source 1..22: mol_type = other DNA
gtcgttggccaagccaggccta

SEQ ID NO: 63974 - DNA, 22 bp, synthetic construct
  misc_feature 1..22: note = chemically synthesized
  source 1..22: mol_type = other DNA
tcgttggccaagccaggcctag

SEQ ID NO: 63975 - DNA, 22 bp, synthetic construct
  misc_feature 1..22: note = chemically synthesized
  source 1..22: mol_type = other DNA
gccaagccaggcctagaatctg

SEQ ID NO: 63976 - DNA, 22 bp, synthetic construct
  misc_feature 1..22: note = chemically synthesized
  source 1..22: mol_type = other DNA
gaatctgggtctccagactctg

SEQ ID NO: 63977 - DNA, 22 bp, synthetic construct
  misc_feature 1..22: note = chemically synthesized
  source 1..22: mol_type = other DNA
ggtctccagactctgggtctgc

SEQ ID NO: 63978 - DNA, 22 bp, synthetic construct
  misc_feature 1..22: note = chemically synthesized
  source 1..22: mol_type = other DNA
cagactctgggtctgctactca

SEQ ID NO: 63979 - DNA, 22 bp, synthetic construct
  misc_feature 1..22: note = chemically synthesized
  source 1..22: mol_type = other DNA
tgggtctgctactcagggcaca

SEQ ID NO: 63980 - DNA, 22 bp, synthetic construct
  misc_feature 1..22: note = chemically synthesized
  source 1..22: mol_type = other DNA
ggtctgctactcagggcacaaa

SEQ ID NO: 63981 - DNA, 22 bp, synthetic construct
  misc_feature 1..22: note = chemically synthesized
  source 1..22: mol_type = other DNA
ctactcagggcacaaaagaaga

SEQ ID NO: 63982 - DNA, 22 bp, synthetic construct
  misc_feature 1..22: note = chemically synthesized
  source 1..22: mol_type = other DNA
ctcagggcacaaaagaagaaaa

SEQ ID NO: 63983 - DNA, 22 bp, synthetic construct
  misc_feature 1..22: note = chemically synthesized
  source 1..22: mol_type = other DNA
agggcacaaaagaagaaaacat

SEQ ID NO: 63984 - DNA, 22 bp, synthetic construct
  misc_feature 1..22: note = chemically synthesized
  source 1..22: mol_type = other DNA
tgagttacaccccttcttggcc

SEQ ID NO: 63985 - DNA, 22 bp, synthetic construct
  misc_feature 1..22: note = chemically synthesized
  source 1..22: mol_type = other DNA
agttacaccccttcttggccag

SEQ ID NO: 63986 - DNA, 22 bp, synthetic construct
  misc_feature 1..22: note = chemically synthesized
  source 1..22: mol_type = other DNA
caccccttcttggccagtagtt

SEQ ID NO: 63987 - DNA, 22 bp, synthetic construct
  misc_feature 1..22: note = chemically synthesized
  source 1..22: mol_type = other DNA
cttggccagtagttgagggtaa

SEQ ID NO: 63988 - DNA, 22 bp, synthetic construct
  misc_feature 1..22: note = chemically synthesized
  source 1..22: mol_type = other DNA
ttggccagtagttgagggtaaa

SEQ ID NO: 63989 - DNA, 22 bp, synthetic construct
  misc_feature 1..22: note = chemically synthesized
  source 1..22: mol_type = other DNA
ggccagtagttgagggtaaatt

SEQ ID NO: 63990 - DNA, 22 bp, synthetic construct
  misc_feature 1..22: note = chemically synthesized
  source 1..22: mol_type = other DNA
gccagtagttgagggtaaatta

SEQ ID NO: 63991 - DNA, 22 bp, synthetic construct
  misc_feature 1..22: note = chemically synthesized
  source 1..22: mol_type = other DNA
agggtaaattaacgaaaagaat

SEQ ID NO: 63992 - DNA, 22 bp, synthetic construct
  misc_feature 1..22: note = chemically synthesized
  source 1..22: mol_type = other DNA
acgaaaagaattaatttgtctg

SEQ ID NO: 63993 - DNA, 22 bp, synthetic construct
  misc_feature 1..22: note = chemically synthesized
  source 1..22: mol_type = other DNA
atttgtctgtaactcttgtctg

SEQ ID NO: 63994 - DNA, 22 bp, synthetic construct
  misc_feature 1..22: note = chemically synthesized
  source 1..22: mol_type = other DNA
gtctgtaactcttgtctgttgc

SEQ ID NO: 63995 - DNA, 22 bp, synthetic construct
  misc_feature 1..22: note = chemically synthesized
  source 1..22: mol_type = other DNA
tctgtaactcttgtctgttgct

SEQ ID NO: 63996 - DNA, 22 bp, synthetic construct
  misc_feature 1..22: note = chemically synthesized
  source 1..22: mol_type = other DNA
taactcttgtctgttgctctct

SEQ ID NO: 63997 - DNA, 22 bp, synthetic construct
  misc_feature 1..22: note = chemically synthesized
  source 1..22: mol_type = other DNA
ttgtctgttgctctctgtttag

SEQ ID NO: 63998 - DNA, 22 bp, synthetic construct
  misc_feature 1..22: note = chemically synthesized
  source 1..22: mol_type = other DNA
gtctgttgctctctgtttagga

SEQ ID NO: 63999 - DNA, 22 bp, synthetic construct
  misc_feature 1..22: note = chemically synthesized
  source 1..22: mol_type = other DNA
tctgttgctctctgtttaggaa

SEQ ID NO: 64000 - DNA, 22 bp, synthetic construct
  misc_feature 1..22: note = chemically synthesized
  source 1..22: mol_type = other DNA
ttgctctctgtttaggaagaac

SEQ ID NO: 64001 - DNA, 22 bp, synthetic construct
  misc_feature 1..22: note = chemically synthesized
  source 1..22: mol_type = other DNA
ctctctgtttaggaagaactaa

SEQ ID NO: 64002 - DNA, 22 bp, synthetic construct
  misc_feature 1..22: note = chemically synthesized
  source 1..22: mol_type = other DNA
tctgtttaggaagaactaaaaa

SEQ ID NO: 64003 - DNA, 22 bp, synthetic construct
  misc_feature 1..22: note = chemically synthesized
  source 1..22: mol_type = other DNA
tgtttaggaagaactaaaaact

SEQ ID NO: 64004 - DNA, 22 bp, synthetic construct
  misc_feature 1..22: note = chemically synthesized
  source 1..22: mol_type = other DNA
tttaggaagaactaaaaactcc

SEQ ID NO: 64005 - DNA, 22 bp, synthetic construct
  misc_feature 1..22: note = chemically synthesized
  source 1..22: mol_type = other DNA
aggaagaactaaaaactccaca

SEQ ID NO: 64006 - DNA, 22 bp, synthetic construct
  misc_feature 1..22: note = chemically synthesized
  source 1..22: mol_type = other DNA
ggaagaactaaaaactccacaa

SEQ ID NO: 64007 - DNA, 22 bp, synthetic construct
  misc_feature 1..22: note = chemically synthesized
  source 1..22: mol_type = other DNA
aaaactccacaaattcaacagt

SEQ ID NO: 64008 - DNA, 22 bp, synthetic construct
  misc_feature 1..22: note = chemically synthesized
  source 1..22: mol_type = other DNA
cacaaattcaacagtctcccct

SEQ ID NO: 64009 - DNA, 22 bp, synthetic construct
  misc_feature 1..22: note = chemically synthesized
  source 1..22: mol_type = other DNA
aacagtctcccctctgtctcca

SEQ ID NO: 64010 - DNA, 22 bp, synthetic construct
  misc_feature 1..22: note = chemically synthesized
  source 1..22: mol_type = other DNA
ccctctgtctccactgaactat

SEQ ID NO: 64011 - DNA, 22 bp, synthetic construct
  misc_feature 1..22: note = chemically synthesized
  source 1..22: mol_type = other DNA
tgtctccactgaactatccctc

SEQ ID NO: 64012 - DNA, 22 bp, synthetic construct
  misc_feature 1..22: note = chemically synthesized
  source 1..22: mol_type = other DNA
tctccactgaactatccctcca

SEQ ID NO: 64013 - DNA, 22 bp, synthetic construct
  misc_feature 1..22: note = chemically synthesized
  source 1..22: mol_type = other DNA
cactgaactatccctccatttt

SEQ ID NO: 64014 - DNA, 22 bp, synthetic construct
  misc_feature 1..22: note = chemically synthesized
  source 1..22: mol_type = other DNA
aactatccctccattttcacca

SEQ ID NO: 64015 - DNA, 22 bp, synthetic construct
  misc_feature 1..22: note = chemically synthesized
  source 1..22: mol_type = other DNA
tccctccattttcaccacactt

SEQ ID NO: 64016 - DNA, 22 bp, synthetic construct
  misc_feature 1..22: note = chemically synthesized
  source 1..22: mol_type = other DNA
cattttcaccacactttttggc

SEQ ID NO: 64017 - DNA, 22 bp, synthetic construct
  misc_feature 1..22: note = chemically synthesized
  source 1..22: mol_type = other DNA
tcaccacactttttggctgcca

SEQ ID NO: 64018 - DNA, 22 bp, synthetic construct
  misc_feature 1..22: note = chemically synthesized
  source 1..22: mol_type = other DNA
caccacactttttggctgccat

SEQ ID NO: 64019 - DNA, 22 bp, synthetic construct
  misc_feature 1..22: note = chemically synthesized
  source 1..22: mol_type = other DNA
accacactttttggctgccatt

SEQ ID NO: 64020 - DNA, 22 bp, synthetic construct
  misc_feature 1..22: note = chemically synthesized
  source 1..22: mol_type = other DNA
tttggctgccattcacaaaaaa

SEQ ID NO: 64021 - DNA, 22 bp, synthetic construct
  misc_feature 1..22: note = chemically synthesized
  source 1..22: mol_type = other DNA
ttggctgccattcacaaaaaaa

SEQ ID NO: 64022 - DNA, 22 bp, synthetic construct
  misc_feature 1..22: note = chemically synthesized
  source 1..22: mol_type = other DNA
tggctgccattcacaaaaaaag

SEQ ID NO: 64023 - DNA, 22 bp, synthetic construct
  misc_feature 1..22: note = chemically synthesized
  source 1..22: mol_type = other DNA
ggctgccattcacaaaaaaagc

SEQ ID NO: 64024 - DNA, 22 bp, synthetic construct
  misc_feature 1..22: note = chemically synthesized
  source 1..22: mol_type = other DNA
gctgccattcacaaaaaaagct

SEQ ID NO: 64025 - DNA, 22 bp, synthetic construct
  misc_feature 1..22: note = chemically synthesized
  source 1..22: mol_type = other DNA
ccattcacaaaaaaagctgaag

SEQ ID NO: 64026 - DNA, 22 bp, synthetic construct
  misc_feature 1..22: note = chemically synthesized
  source 1..22: mol_type = other DNA
acaaaaaaagctgaagccagcc

SEQ ID NO: 64027 - DNA, 22 bp, synthetic construct
  misc_feature 1..22: note = chemically synthesized
  source 1..22: mol_type = other DNA
aagccagccatgggtaactatt

SEQ ID NO: 64028 - DNA, 22 bp, synthetic construct
  misc_feature 1..22: note = chemically synthesized
  source 1..22: mol_type = other DNA
ttaaaatccatgtggttgcaga

SEQ ID NO: 64029 - DNA, 22 bp, synthetic construct
  misc_feature 1..22: note = chemically synthesized
  source 1..22: mol_type = other DNA
aaatccatgtggttgcagagac

SEQ ID NO: 64030 - DNA, 22 bp, synthetic construct
  misc_feature 1..22: note = chemically synthesized
  source 1..22: mol_type = other DNA
cagagacagcatccctatcaca

SEQ ID NO: 64031 - DNA, 22 bp, synthetic construct
  misc_feature 1..22: note = chemically synthesized
  source 1..22: mol_type = other DNA
tcacatgagcttttgccctgtc

SEQ ID NO: 64032 - DNA, 22 bp, synthetic construct
  misc_feature 1..22: note = chemically synthesized
  source 1..22: mol_type = other DNA
ttgccctgtccccaaggccctc

SEQ ID NO: 64033 - DNA, 22 bp, synthetic construct
  misc_feature 1..22: note = chemically synthesized
  source 1..22: mol_type = other DNA
tgccctgtccccaaggccctct

SEQ ID NO: 64034 - DNA, 22 bp, synthetic construct
  misc_feature 1..22: note = chemically synthesized
  source 1..22: mol_type = other DNA
gccctgtccccaaggccctctg

SEQ ID NO: 64035 - DNA, 22 bp, synthetic construct
  misc_feature 1..22: note = chemically synthesized
  source 1..22: mol_type = other DNA
ccctgtccccaaggccctctgt

SEQ ID NO: 64036 - DNA, 22 bp, synthetic construct
  misc_feature 1..22: note = chemically synthesized
  source 1..22: mol_type = other DNA
tccccaaggccctctgtcatct

SEQ ID NO: 64037 - DNA, 22 bp, synthetic construct
  misc_feature 1..22: note = chemically synthesized
  source 1..22: mol_type = other DNA
tgtcatctccactccttgtggg

SEQ ID NO: 64038 - DNA, 22 bp, synthetic construct
  misc_feature 1..22: note = chemically synthesized
  source 1..22: mol_type = other DNA
tcatctccactccttgtgggcc

SEQ ID NO: 64039 - DNA, 22 bp, synthetic construct
  misc_feature 1..22: note = chemically synthesized
  source 1..22: mol_type = other DNA
cactccttgtgggccaccacag

SEQ ID NO: 64040 - DNA, 22 bp, synthetic construct
  misc_feature 1..22: note = chemically synthesized
  source 1..22: mol_type = other DNA
cttgtgggccaccacagcaagg

SEQ ID NO: 64041 - DNA, 22 bp, synthetic construct
  misc_feature 1..22: note = chemically synthesized
  source 1..22: mol_type = other DNA
gtgggccaccacagcaaggctg

SEQ ID NO: 64042 - DNA, 22 bp, synthetic construct
  misc_feature 1..22: note = chemically synthesized
  source 1..22: mol_type = other DNA
tgggccaccacagcaaggctga

SEQ ID NO: 64043 - DNA, 22 bp, synthetic construct
  misc_feature 1..22: note = chemically synthesized
  source 1..22: mol_type = other DNA
actcactggctctgaagaagat

SEQ ID NO: 64044 - DNA, 22 bp, synthetic construct
  misc_feature 1..22: note = chemically synthesized
  source 1..22: mol_type = other DNA
actggctctgaagaagatccac

SEQ ID NO: 64045 - DNA, 22 bp, synthetic construct
  misc_feature 1..22: note = chemically synthesized
  source 1..22: mol_type = other DNA
gctctgaagaagatccacaaag

SEQ ID NO: 64046 - DNA, 22 bp, synthetic construct
  misc_feature 1..22: note = chemically synthesized
  source 1..22: mol_type = other DNA
tgaagaagatccacaaagcctg

SEQ ID NO: 64047 - DNA, 22 bp, synthetic construct
  misc_feature 1..22: note = chemically synthesized
  source 1..22: mol_type = other DNA
aagaagatccacaaagcctgtg

SEQ ID NO: 64048 - DNA, 22 bp, synthetic construct
  misc_feature 1..22: note = chemically synthesized
  source 1..22: mol_type = other DNA
tggagaggaggcccacagctct

SEQ ID NO: 64049 - DNA, 22 bp, synthetic construct
  misc_feature 1..22: note = chemically synthesized
  source 1..22: mol_type = other DNA
tccaggatgcatgaggaggggc

SEQ ID NO: 64050 - DNA, 22 bp, synthetic construct
  misc_feature 1..22: note = chemically synthesized
  source 1..22: mol_type = other DNA
caggatgcatgaggaggggcca

SEQ ID NO: 64051 - DNA, 22 bp, synthetic construct
  misc_feature 1..22: note = chemically synthesized
  source 1..22: mol_type = other DNA
tccctcttggcccatgggaaat

SEQ ID NO: 64052 - DNA, 22 bp, synthetic construct
  misc_feature 1..22: note = chemically synthesized
  source 1..22: mol_type = other DNA
ccctcttggcccatgggaaatc

SEQ ID NO: 64053 - DNA, 22 bp, synthetic construct
  misc_feature 1..22: note = chemically synthesized
  source 1..22: mol_type = other DNA
cctcttggcccatgggaaatcc

SEQ ID NO: 64054 - DNA, 22 bp, synthetic construct
  misc_feature 1..22: note = chemically synthesized
  source 1..22: mol_type = other DNA
ttggcccatgggaaatcctagg

SEQ ID NO: 64055 - DNA, 22 bp, synthetic construct
  misc_feature 1..22: note = chemically synthesized
  source 1..22: mol_type = other DNA
ggcccatgggaaatcctaggag

SEQ ID NO: 64056 - DNA, 22 bp, synthetic construct
  misc_feature 1..22: note = chemically synthesized
  source 1..22: mol_type = other DNA
gcccatgggaaatcctaggagg

SEQ ID NO: 64057 - DNA, 22 bp, synthetic construct
  misc_feature 1..22: note = chemically synthesized
  source 1..22: mol_type = other DNA
ggaggcaacataagcctgtggc

SEQ ID NO: 64058 - DNA, 22 bp, synthetic construct
  misc_feature 1..22: note = chemically synthesized
  source 1..22: mol_type = other DNA
tggcagcccctccacaaagccc

SEQ ID NO: 64059 - DNA, 22 bp, synthetic construct
  misc_feature 1..22: note = chemically synthesized
  source 1..22: mol_type = other DNA
cacaaagccctgcctccagagt

SEQ ID NO: 64060 - DNA, 22 bp, synthetic construct
  misc_feature 1..22: note = chemically synthesized
  source 1..22: mol_type = other DNA
cctccagagttcccataggcga

SEQ ID NO: 64061 - DNA, 22 bp, synthetic construct
  misc_feature 1..22: note = chemically synthesized
  source 1..22: mol_type = other DNA
cagagttcccataggcgagaat

SEQ ID NO: 64062 - DNA, 22 bp, synthetic construct
  misc_feature 1..22: note = chemically synthesized
  source 1..22: mol_type = other DNA
ccataggcgagaatgtgtcctc

SEQ ID NO: 64063 - DNA, 22 bp, synthetic construct
  misc_feature 1..22: note = chemically synthesized
  source 1..22: mol_type = other DNA
agtggagcattaccttgcacag

SEQ ID NO: 64064 - DNA, 22 bp, synthetic construct
  misc_feature 1..22: note = chemically synthesized
  source 1..22: mol_type = other DNA
ccttgcacagcctgtgaagtgc

SEQ ID NO: 64065 - DNA, 22 bp, synthetic construct
  misc_feature 1..22: note = chemically synthesized
  source 1..22: mol_type = other DNA
gcacagcctgtgaagtgctctg

SEQ ID NO: 64066 - DNA, 22 bp, synthetic construct
  misc_feature 1..22: note = chemically synthesized
  source 1..22: mol_type = other DNA
cacagcctgtgaagtgctctgt

SEQ ID NO: 64067 - DNA, 22 bp, synthetic construct
  misc_feature 1..22: note = chemically synthesized
  source 1..22: mol_type = other DNA
tgaagtgctctgtgcggggata

SEQ ID NO: 64068 - DNA, 22 bp, synthetic construct
  misc_feature 1..22: note = chemically synthesized
  source 1..22: mol_type = other DNA
tgtgcggggataaaggcaagta

SEQ ID NO: 64069 - DNA, 22 bp, synthetic construct
  misc_feature 1..22: note = chemically synthesized
  source 1..22: mol_type = other DNA
tgcggggataaaggcaagtaac

SEQ ID NO: 64070 - DNA, 22 bp, synthetic construct
  misc_feature 1..22: note = chemically synthesized
  source 1..22: mol_type = other DNA
tctcaaggaattgctagcttat

SEQ ID NO: 64071 - DNA, 22 bp, synthetic construct
  misc_feature 1..22: note = chemically synthesized
  source 1..22: mol_type = other DNA
tcaaggaattgctagcttatgg

SEQ ID NO: 64072 - DNA, 22 bp, synthetic construct
  misc_feature 1..22: note = chemically synthesized
  source 1..22: mol_type = other DNA
aaggaattgctagcttatgggg

SEQ ID NO: 64073 - DNA, 22 bp, synthetic construct
  misc_feature 1..22: note = chemically synthesized
  source 1..22: mol_type = other DNA
ctagcttatggggagagaaaac

SEQ ID NO: 64074 - DNA, 22 bp, synthetic construct
  misc_feature 1..22: note = chemically synthesized
  source 1..22: mol_type = other DNA
gcttatggggagagaaaactaa

SEQ ID NO: 64075 - DNA, 22 bp, synthetic construct
  misc_feature 1..22: note = chemically synthesized
  source 1..22: mol_type = other DNA
atggggagagaaaactaaacgt

SEQ ID NO: 64076 - DNA, 22 bp, synthetic construct
  misc_feature 1..22: note = chemically synthesized
  source 1..22: mol_type = other DNA
tggggagagaaaactaaacgtg

SEQ ID NO: 64077 - DNA, 22 bp, synthetic construct
  misc_feature 1..22: note = chemically synthesized
  source 1..22: mol_type = other DNA
aacgtggaagccccaacagtgt

SEQ ID NO: 64078 - DNA, 22 bp, synthetic construct
  misc_feature 1..22: note = chemically synthesized
  source 1..22: mol_type = other DNA
gagtatgaagggggccccacct

SEQ ID NO: 64079 - DNA, 22 bp, synthetic construct
  misc_feature 1..22: note = chemically synthesized
  source 1..22: mol_type = other DNA
aggaggtcggggagtgtggcgt

SEQ ID NO: 64080 - DNA, 22 bp, synthetic construct
  misc_feature 1..22: note = chemically synthesized
  source 1..22: mol_type = other DNA
ccccatagcaggatgtgtgcaa

SEQ ID NO: 64081 - DNA, 22 bp, synthetic construct
  misc_feature 1..22: note = chemically synthesized
  source 1..22: mol_type = other DNA
ccactggtactcagcatctgcc

SEQ ID NO: 64082 - DNA, 22 bp, synthetic construct
  misc_feature 1..22: note = chemically synthesized
  source 1..22: mol_type = other DNA
gtactcagcatctgccacctcg

SEQ ID NO: 64083 - DNA, 22 bp, synthetic construct
  misc_feature 1..22: note = chemically synthesized
  source 1..22: mol_type = other DNA
agcatctgccacctcgctgacc

SEQ ID NO: 64084 - DNA, 22 bp, synthetic construct
  misc_feature 1..22: note = chemically synthesized
  source 1..22: mol_type = other DNA
ccacctcgctgaccctcatttg

SEQ ID NO: 64085 - DNA, 22 bp, synthetic construct
  misc_feature 1..22: note = chemically synthesized
  source 1..22: mol_type = other DNA
gctgaccctcatttgaccctcc

SEQ ID NO: 64086 - DNA, 22 bp, synthetic construct
  misc_feature 1..22: note = chemically synthesized
  source 1..22: mol_type = other DNA
accctcatttgaccctcccagg

SEQ ID NO: 64087 - DNA, 22 bp, synthetic construct
  misc_feature 1..22: note = chemically synthesized
  source 1..22: mol_type = other DNA
atttgaccctcccaggcaagtg

SEQ ID NO: 64088 - DNA, 22 bp, synthetic construct
  misc_feature 1..22: note = chemically synthesized
  source 1..22: mol_type = other DNA
gaccctcccaggcaagtgctgt

SEQ ID NO: 64089 - DNA, 22 bp, synthetic construct
  misc_feature 1..22: note = chemically synthesized
  source 1..22: mol_type = other DNA
accctcccaggcaagtgctgtg

SEQ ID NO: 64090 - DNA, 22 bp, synthetic construct
  misc_feature 1..22: note = chemically synthesized
  source 1..22: mol_type = other DNA
ccaggcaagtgctgtgatgacc

SEQ ID NO: 64091 - DNA, 22 bp, synthetic construct
  misc_feature 1..22: note = chemically synthesized
  source 1..22: mol_type = other DNA
tgatgaccccctccctggtgag

SEQ ID NO: 64092 - DNA, 22 bp, synthetic construct
  misc_feature 1..22: note = chemically synthesized
  source 1..22: mol_type = other DNA
cctggtgaggagccggccagga

SEQ ID NO: 64093 - DNA, 22 bp, synthetic construct
  misc_feature 1..22: note = chemically synthesized
  source 1..22: mol_type = other DNA
gtgaggagccggccaggacttg

SEQ ID NO: 64094 - DNA, 22 bp, synthetic construct
  misc_feature 1..22: note = chemically synthesized
  source 1..22: mol_type = other DNA
ggatccaagaagtctggcttca

SEQ ID NO: 64095 - DNA, 22 bp, synthetic construct
  misc_feature 1..22: note = chemically synthesized
  source 1..22: mol_type = other DNA
gatccaagaagtctggcttcaa

SEQ ID NO: 64096 - DNA, 22 bp, synthetic construct
  misc_feature 1..22: note = chemically synthesized
  source 1..22: mol_type = other DNA
gcttcaaaccccatgctctgac

SEQ ID NO: 64097 - DNA, 22 bp, synthetic construct
  misc_feature 1..22: note = chemically synthesized
  source 1..22: mol_type = other DNA
caaaccccatgctctgaccgct

SEQ ID NO: 64098 - DNA, 22 bp, synthetic construct
  misc_feature 1..22: note = chemically synthesized
  source 1..22: mol_type = other DNA
aaaccccatgctctgaccgctc

SEQ ID NO: 64099 - DNA, 22 bp, synthetic construct
  misc_feature 1..22: note = chemically synthesized
  source 1..22: mol_type = other DNA
tgaccgctcgatggcaccgctt

SEQ ID NO: 64100 - DNA, 22 bp, synthetic construct
  misc_feature 1..22: note = chemically synthesized
  source 1..22: mol_type = other DNA
accgctcgatggcaccgcttcc

SEQ ID NO: 64101 - DNA, 22 bp, synthetic construct
  misc_feature 1..22: note = chemically synthesized
  source 1..22: mol_type = other DNA
gatggcaccgcttccttggcag

SEQ ID NO: 64102 - DNA, 22 bp, synthetic construct
  misc_feature 1..22: note = chemically synthesized
  source 1..22: mol_type = other DNA
ccttggcaggacatctacagct

SEQ ID NO: 64103 - DNA, 22 bp, synthetic construct
  misc_feature 1..22: note = chemically synthesized
  source 1..22: mol_type = other DNA
cttggcaggacatctacagctc

SEQ ID NO: 64104 - DNA, 22 bp, synthetic construct
  misc_feature 1..22: note = chemically synthesized
  source 1..22: mol_type = other DNA
ggcaggacatctacagctccca

SEQ ID NO: 64105 - DNA, 22 bp, synthetic construct
  misc_feature 1..22: note = chemically synthesized
  source 1..22: mol_type = other DNA
gcaggacatctacagctcccag

SEQ ID NO: 64106 - DNA, 22 bp, synthetic construct
  misc_feature 1..22: note = chemically synthesized
  source 1..22: mol_type = other DNA
cagctcccagggcacccagggg

SEQ ID NO: 64107 - DNA, 22 bp, synthetic construct
  misc_feature 1..22: note = chemically synthesized
  source 1..22: mol_type = other DNA
ccagggcacccaggggacatca

SEQ ID NO: 64108 - DNA, 22 bp, synthetic construct
  misc_feature 1..22: note = chemically synthesized
  source 1..22: mol_type = other DNA
tgaaaggggaatggtcagaccc

SEQ ID NO: 64109 - DNA, 22 bp, synthetic construct
  misc_feature 1..22: note = chemically synthesized
  source 1..22: mol_type = other DNA
aaaggggaatggtcagacccgg

SEQ ID NO: 64110 - DNA, 22 bp, synthetic construct
  misc_feature 1..22: note = chemically synthesized
  source 1..22: mol_type = other DNA
gaatgccatgctaaggagttcg

SEQ ID NO: 64111 - DNA, 22 bp, synthetic construct
  misc_feature 1..22: note = chemically synthesized
  source 1..22: mol_type = other DNA
aatgccatgctaaggagttcgg

SEQ ID NO: 64112 - DNA, 22 bp, synthetic construct
  misc_feature 1..22: note = chemically synthesized
  source 1..22: mol_type = other DNA
aggagttcggacttgacaagag

SEQ ID NO: 64113 - DNA, 22 bp, synthetic construct
  misc_feature 1..22: note = chemically synthesized
  source 1..22: mol_type = other DNA
ggacttgacaagaggcagcagc

SEQ ID NO: 64114 - DNA, 22 bp, synthetic construct
  misc_feature 1..22: note = chemically synthesized
  source 1..22: mol_type = other DNA
gacaagaggcagcagcaaaggg

SEQ ID NO: 64115 - DNA, 22 bp, synthetic construct
  misc_feature 1..22: note = chemically synthesized
  source 1..22: mol_type = other DNA
acaagaggcagcagcaaagggt

SEQ ID NO: 64116 - DNA, 22 bp, synthetic construct
  misc_feature 1..22: note = chemically synthesized
  source 1..22: mol_type = other DNA
tgataacctggttagacgtgct

SEQ ID NO: 64117 - DNA, 22 bp, synthetic construct
  misc_feature 1..22: note = chemically synthesized
  source 1..22: mol_type = other DNA
gataacctggttagacgtgctc

SEQ ID NO: 64118 - DNA, 22 bp, synthetic construct
  misc_feature 1..22: note = chemically synthesized
  source 1..22: mol_type = other DNA
ataacctggttagacgtgctct

SEQ ID NO: 64119 - DNA, 22 bp, synthetic construct
  misc_feature 1..22: note = chemically synthesized
  source 1..22: mol_type = other DNA
gttagacgtgctctgatttatt

SEQ ID NO: 64120 - DNA, 22 bp, synthetic construct
  misc_feature 1..22: note = chemically synthesized
  source 1..22: mol_type = other DNA
gacgtgctctgatttattgtat

SEQ ID NO: 64121 - DNA, 22 bp, synthetic construct
  misc_feature 1..22: note = chemically synthesized
  source 1..22: mol_type = other DNA
tgatttattgtatttcactgct

SEQ ID NO: 64122 - DNA, 22 bp, synthetic construct
  misc_feature 1..22: note = chemically synthesized
  source 1..22: mol_type = other DNA
atttattgtatttcactgctgc

SEQ ID NO: 64123 - DNA, 22 bp, synthetic construct
  misc_feature 1..22: note = chemically synthesized
  source 1..22: mol_type = other DNA
attgtatttcactgctgcaaga

SEQ ID NO: 64124 - DNA, 22 bp, synthetic construct
  misc_feature 1..22: note = chemically synthesized
  source 1..22: mol_type = other DNA
ttgtatttcactgctgcaagat

SEQ ID NO: 64125 - DNA, 22 bp, synthetic construct
  misc_feature 1..22: note = chemically synthesized
  source 1..22: mol_type = other DNA
tatttcactgctgcaagattta

SEQ ID NO: 64126 - DNA, 22 bp, synthetic construct
  misc_feature 1..22: note = chemically synthesized
  source 1..22: mol_type = other DNA
cactgctgcaagatttactgga

SEQ ID NO: 64127 - DNA, 22 bp, synthetic construct
  misc_feature 1..22: note = chemically synthesized
  source 1..22: mol_type = other DNA
actgctgcaagatttactggac

SEQ ID NO: 64128 - DNA, 22 bp, synthetic construct
  misc_feature 1..22: note = chemically synthesized
  source 1..22: mol_type = other DNA
ctgcaagatttactggacaaag

SEQ ID NO: 64129 - DNA, 22 bp, synthetic construct
  misc_feature 1..22: note = chemically synthesized
  source 1..22: mol_type = other DNA
caagatttactggacaaagagg

SEQ ID NO: 64130 - DNA, 22 bp, synthetic construct
  misc_feature 1..22: note = chemically synthesized
  source 1..22: mol_type = other DNA
actggacaaagaggaggagggg

SEQ ID NO: 64131 - DNA, 22 bp, synthetic construct
  misc_feature 1..22: note = chemically synthesized
  source 1..22: mol_type = other DNA
ctggacaaagaggaggaggggg

SEQ ID NO: 64132 - DNA, 22 bp, synthetic construct
  misc_feature 1..22: note = chemically synthesized
  source 1..22: mol_type = other DNA
gacaaagaggaggagggggaga

SEQ ID NO: 64133 - DNA, 22 bp, synthetic construct
  misc_feature 1..22: note = chemically synthesized
  source 1..22: mol_type = other DNA
gaagcccaagcaaaggccaggg

SEQ ID NO: 64134 - DNA, 22 bp, synthetic construct
  misc_feature 1..22: note = chemically synthesized
  source 1..22: mol_type = other DNA
ccagcctgagcgcggagtgcat

SEQ ID NO: 64135 - DNA, 22 bp, synthetic construct
  misc_feature 1..22: note = chemically synthesized
  source 1..22: mol_type = other DNA
cagcctgagcgcggagtgcatg

SEQ ID NO: 64136 - DNA, 22 bp, synthetic construct
  misc_feature 1..22: note = chemically synthesized
  source 1..22: mol_type = other DNA
agcgcggagtgcatgcaggctg

SEQ ID NO: 64137 - DNA, 22 bp, synthetic construct
  misc_feature 1..22: note = chemically synthesized
  source 1..22: mol_type = other DNA
cgcggtggccgcccgggttgca

SEQ ID NO: 64138 - DNA, 22 bp, synthetic construct
  misc_feature 1..22: note = chemically synthesized
  source 1..22: mol_type = other DNA
cagggaacgcgcgggccagcga

SEQ ID NO: 64139 - DNA, 22 bp, synthetic construct
  misc_feature 1..22: note = chemically synthesized
  source 1..22: mol_type = other DNA
tgcggtgctaccccgtgcccgc

SEQ ID NO: 64140 - DNA, 22 bp, synthetic construct
  misc_feature 1..22: note = chemically synthesized
  source 1..22: mol_type = other DNA
cggtgctaccccgtgcccgcac

SEQ ID NO: 64141 - DNA, 22 bp, synthetic construct
  misc_feature 1..22: note = chemically synthesized
  source 1..22: mol_type = other DNA
ccccgtgcccgcactcacccag

SEQ ID NO: 64142 - DNA, 22 bp, synthetic construct
  misc_feature 1..22: note = chemically synthesized
  source 1..22: mol_type = other DNA
acccaggacggcgcagaccagc

SEQ ID NO: 64143 - DNA, 22 bp, synthetic construct
  misc_feature 1..22: note = chemically synthesized
  source 1..22: mol_type = other DNA
ccacggcgagcctcatcttccg

SEQ ID NO: 64144 - DNA, 22 bp, synthetic construct
  misc_feature 1..22: note = chemically synthesized
  source 1..22: mol_type = other DNA
atcttccgggtgcggcgctgag

SEQ ID NO: 64145 - DNA, 22 bp, synthetic construct
  misc_feature 1..22: note = chemically synthesized
  source 1..22: mol_type = other DNA
ccgggtgcggcgctgagcagcg

SEQ ID NO: 64146 - DNA, 22 bp, synthetic construct
  misc_feature 1..22: note = chemically synthesized
  source 1..22: mol_type = other DNA
cgggtgcggcgctgagcagcga

SEQ ID NO: 64147 - DNA, 22 bp, synthetic construct
  misc_feature 1..22: note = chemically synthesized
  source 1..22: mol_type = other DNA
agcagcgagcacagtcggactc

SEQ ID NO: 64148 - DNA, 22 bp, synthetic construct
  misc_feature 1..22: note = chemically synthesized
  source 1..22: mol_type = other DNA
gcttctgtgcagcctccggcgc

SEQ ID NO: 64149 - DNA, 22 bp, synthetic construct
  misc_feature 1..22: note = chemically synthesized
  source 1..22: mol_type = other DNA
ctgtgcagcctccggcgccccg

SEQ ID NO: 64150 - DNA, 22 bp, synthetic construct
  misc_feature 1..22: note = chemically synthesized
  source 1..22: mol_type = other DNA
tgtgcagcctccggcgccccgc

SEQ ID NO: 64151 - DNA, 22 bp, synthetic construct
  misc_feature 1..22: note = chemically synthesized
  source 1..22: mol_type = other DNA
tgcagcctccggcgccccgcgt

SEQ ID NO: 64152 - DNA, 22 bp, synthetic construct
  misc_feature 1..22: note = chemically synthesized
  source 1..22: mol_type = other DNA
cggcgccccgcgtccctttatt

SEQ ID NO: 64153 - DNA, 22 bp, synthetic construct
  misc_feature 1..22: note = chemically synthesized
  source 1..22: mol_type = other DNA
tattccattcccggcctgggcg

SEQ ID NO: 64154 - DNA, 22 bp, synthetic construct
  misc_feature 1..22: note = chemically synthesized
  source 1..22: mol_type = other DNA
attccattcccggcctgggcgg

SEQ ID NO: 64155 - DNA, 22 bp, synthetic construct
  misc_feature 1..22: note = chemically synthesized
  source 1..22: mol_type = other DNA
ttccattcccggcctgggcggg

SEQ ID NO: 64156 - DNA, 22 bp, synthetic construct
  misc_feature 1..22: note = chemically synthesized
  source 1..22: mol_type = other DNA
cattcccggcctgggcgggctg

SEQ ID NO: 64157 - DNA, 22 bp, synthetic construct
  misc_feature 1..22: note = chemically synthesized
  source 1..22: mol_type = other DNA
ccggcctgggcgggctgggcgc

SEQ ID NO: 64158 - DNA, 22 bp, synthetic construct
  misc_feature 1..22: note = chemically synthesized
  source 1..22: mol_type = other DNA
ggcgggctgggcgcaatctttg

SEQ ID NO: 64159 - DNA, 22 bp, synthetic construct
  misc_feature 1..22: note = chemically synthesized
  source 1..22: mol_type = other DNA
ggcgcaatctttgacctcccgt

SEQ ID NO: 64160 - DNA, 22 bp, synthetic construct
  misc_feature 1..22: note = chemically synthesized
  source 1..22: mol_type = other DNA
tgacctcccgtgtttgtgcagc

SEQ ID NO: 64161 - DNA, 22 bp, synthetic construct
  misc_feature 1..22: note = chemically synthesized
  source 1..22: mol_type = other DNA
gacctcccgtgtttgtgcagcc

SEQ ID NO: 64162 - DNA, 22 bp, synthetic construct
  misc_feature 1..22: note = chemically synthesized
  source 1..22: mol_type = other DNA
acctcccgtgtttgtgcagccg

SEQ ID NO: 64163 - DNA, 22 bp, synthetic construct
  misc_feature 1..22: note = chemically synthesized
  source 1..22: mol_type = other DNA
ccgtgtttgtgcagccgggttg

SEQ ID NO: 64164 - DNA, 22 bp, synthetic construct
  misc_feature 1..22: note = chemically synthesized
  source 1..22: mol_type = other DNA
gtgcagccgggttgcccaatcg

SEQ ID NO: 64165 - DNA, 22 bp, synthetic construct
  misc_feature 1..22: note = chemically synthesized
  source 1..22: mol_type = other DNA
tgcagccgggttgcccaatcgc

SEQ ID NO: 64166 - DNA, 22 bp, synthetic construct
  misc_feature 1..22: note = chemically synthesized
  source 1..22: mol_type = other DNA
cccaatcgcccctctcccaacc

SEQ ID NO: 64167 - DNA, 22 bp, synthetic construct
  misc_feature 1..22: note = chemically synthesized
  source 1..22: mol_type = other DNA
tcccaaccccccttccttactc

SEQ ID NO: 64168 - DNA, 22 bp, synthetic construct
  misc_feature 1..22: note = chemically synthesized
  source 1..22: mol_type = other DNA
ccaaccccccttccttactcgt

SEQ ID NO: 64169 - DNA, 22 bp, synthetic construct
  misc_feature 1..22: note = chemically synthesized
  source 1..22: mol_type = other DNA
ccttactcgtcccactgatcac

SEQ ID NO: 64170 - DNA, 22 bp, synthetic construct
  misc_feature 1..22: note = chemically synthesized
  source 1..22: mol_type = other DNA
cttactcgtcccactgatcacc

SEQ ID NO: 64171 - DNA, 22 bp, synthetic construct
  misc_feature 1..22: note = chemically synthesized
  source 1..22: mol_type = other DNA
actcgtcccactgatcacctca

SEQ ID NO: 64172 - DNA, 22 bp, synthetic construct
  misc_feature 1..22: note = chemically synthesized
  source 1..22: mol_type = other DNA
ctcgtcccactgatcacctcat

SEQ ID NO: 64173 - DNA, 22 bp, synthetic construct
  misc_feature 1..22: note = chemically synthesized
  source 1..22: mol_type = other DNA
gtcccactgatcacctcatttt

SEQ ID NO: 64174 - DNA, 22 bp, synthetic construct
  misc_feature 1..22: note = chemically synthesized
  source 1..22: mol_type = other DNA
atcacctcattttctgagctct

SEQ ID NO: 64175 - DNA, 22 bp, synthetic construct
  misc_feature 1..22: note = chemically synthesized
  source 1..22: mol_type = other DNA
attttctgagctctggagacga

SEQ ID NO: 64176 - DNA, 22 bp, synthetic construct
  misc_feature 1..22: note = chemically synthesized
  source 1..22: mol_type = other DNA
tctgagctctggagacgacccg

SEQ ID NO: 64177 - DNA, 22 bp, synthetic construct
  misc_feature 1..22: note = chemically synthesized
  source 1..22: mol_type = other DNA
ctgagctctggagacgacccgc

SEQ ID NO: 64178 - DNA, 22 bp, synthetic construct
  misc_feature 1..22: note = chemically synthesized
  source 1..22: mol_type = other DNA
tgagctctggagacgacccgcg

SEQ ID NO: 64179 - DNA, 22 bp, synthetic construct
  misc_feature 1..22: note = chemically synthesized
  source 1..22: mol_type = other DNA
agctctggagacgacccgcgag

SEQ ID NO: 64180 - DNA, 22 bp, synthetic construct
  misc_feature 1..22: note = chemically synthesized
  source 1..22: mol_type = other DNA
tggagacgacccgcgagtggaa

SEQ ID NO: 64181 - DNA, 22 bp, synthetic construct
  misc_feature 1..22: note = chemically synthesized
  source 1..22: mol_type = other DNA
gagacgacccgcgagtggaagg

SEQ ID NO: 64182 - DNA, 22 bp, synthetic construct
  misc_feature 1..22: note = chemically synthesized
  source 1..22: mol_type = other DNA
atgggaagggacatgaagcaca

SEQ ID NO: 64183 - DNA, 22 bp, synthetic construct
  misc_feature 1..22: note = chemically synthesized
  source 1..22: mol_type = other DNA
tcatcgcggctcgctcggtgcc

SEQ ID NO: 64184 - DNA, 20 bp, synthetic construct
  misc_feature 1..20: note = chemically synthesized
  source 1..20: mol_type = other DNA
actaagtcaataatcagaat

SEQ ID NO: 64185 - DNA, 20 bp, synthetic construct
  misc_feature 1..20: note = chemically synthesized
  source 1..20: mol_type = other DNA
aagtcaataatcagaatcag

SEQ ID NO: 64186 - DNA, 20 bp, synthetic construct
  misc_feature 1..20: note = chemically synthesized
  source 1..20: mol_type = other DNA
agtcaataatcagaatcagc

SEQ ID NO: 64187 - DNA, 20 bp, synthetic construct
  misc_feature 1..20: note = chemically synthesized
  source 1..20: mol_type = other DNA
aatcagaatcagcaggtttg

SEQ ID NO: 64188 - DNA, 20 bp, synthetic construct
  misc_feature 1..20: note = chemically synthesized
  source 1..20: mol_type = other DNA
agaatcagcaggtttgcagt

SEQ ID NO: 64189 - DNA, 20 bp, synthetic construct
  misc_feature 1..20: note = chemically synthesized
  source 1..20: mol_type = other DNA
cagcaggtttgcagtcagat

SEQ ID NO: 64190 - DNA, 20 bp, synthetic construct
  misc_feature 1..20: note = chemically synthesized
  source 1..20: mol_type = other DNA
caggtttgcagtcagattgg

SEQ ID NO: 64191 - DNA, 20 bp, synthetic construct
  misc_feature 1..20: note = chemically synthesized
  source 1..20: mol_type = other DNA
aggtttgcagtcagattggc

SEQ ID NO: 64192 - DNA, 20 bp, synthetic construct
  misc_feature 1..20: note = chemically synthesized
  source 1..20: mol_type = other DNA
ggtttgcagtcagattggca

SEQ ID NO: 64193 - DNA, 20 bp, synthetic construct
  misc_feature 1..20: note = chemically synthesized
  source 1..20: mol_type = other DNA
gcagtcagattggcagggat

SEQ ID NO: 64194 - DNA, 20 bp, synthetic construct
  misc_feature 1..20: note = chemically synthesized
  source 1..20: mol_type = other DNA
gtcagattggcagggataag

SEQ ID NO: 64195 - DNA, 20 bp, synthetic construct
  misc_feature 1..20: note = chemically synthesized
  source 1..20: mol_type = other DNA
attggcagggataagcagcc

SEQ ID NO: 64196 - DNA, 20 bp, synthetic construct
  misc_feature 1..20: note = chemically synthesized
  source 1..20: mol_type = other DNA
cagggataagcagcctagct

SEQ ID NO: 64197 - DNA, 20 bp, synthetic construct
  misc_feature 1..20: note = chemically synthesized
  source 1..20: mol_type = other DNA
agggataagcagcctagctc

SEQ ID NO: 64198 - DNA, 20 bp, synthetic construct
  misc_feature 1..20: note = chemically synthesized
  source 1..20: mol_type = other DNA
ggataagcagcctagctcag

SEQ ID NO: 64199 - DNA, 20 bp, synthetic construct
  misc_feature 1..20: note = chemically synthesized
  source 1..20: mol_type = other DNA
taagcagcctagctcaggag

SEQ ID NO: 64200 - DNA, 20 bp, synthetic construct
  misc_feature 1..20: note = chemically synthesized
  source 1..20: mol_type = other DNA
cagcctagctcaggagaagt

SEQ ID NO: 64201 - DNA, 20 bp, synthetic construct
  misc_feature 1..20: note = chemically synthesized
  source 1..20: mol_type = other DNA
ctcaggagaagtgagtataa

SEQ ID NO: 64202 - DNA, 20 bp, synthetic construct
  misc_feature 1..20: note = chemically synthesized
  source 1..20: mol_type = other DNA
agaagtgagtataaaagccc

SEQ ID NO: 64203 - DNA, 20 bp, synthetic construct
  misc_feature 1..20: note = chemically synthesized
  source 1..20: mol_type = other DNA
gaagtgagtataaaagcccc

SEQ ID NO: 64204 - DNA, 20 bp, synthetic construct
  misc_feature 1..20: note = chemically synthesized
  source 1..20: mol_type = other DNA
tgagtataaaagccccaggc

SEQ ID NO: 64205 - DNA, 20 bp, synthetic construct
  misc_feature 1..20: note = chemically synthesized
  source 1..20: mol_type = other DNA
gagtataaaagccccaggct

SEQ ID NO: 64206 - DNA, 20 bp, synthetic construct
  misc_feature 1..20: note = chemically synthesized
  source 1..20: mol_type = other DNA
gtataaaagccccaggctgg

SEQ ID NO: 64207 - DNA, 20 bp, synthetic construct
  misc_feature 1..20: note = chemically synthesized
  source 1..20: mol_type = other DNA
taaaagccccaggctgggag

SEQ ID NO: 64208 - DNA, 20 bp, synthetic construct
  misc_feature 1..20: note = chemically synthesized
  source 1..20: mol_type = other DNA
caggctgggagcagccatca

SEQ ID NO: 64209 - DNA, 20 bp, synthetic construct
  misc_feature 1..20: note = chemically synthesized
  source 1..20: mol_type = other DNA
gctgggagcagccatcacag

SEQ ID NO: 64210 - DNA, 20 bp, synthetic construct
  misc_feature 1..20: note = chemically synthesized
  source 1..20: mol_type = other DNA
cacagaagtccactcattct

SEQ ID NO: 64211 - DNA, 20 bp, synthetic construct
  misc_feature 1..20: note = chemically synthesized
  source 1..20: mol_type = other DNA
agaagtccactcattcttgg

SEQ ID NO: 64212 - DNA, 20 bp, synthetic construct
  misc_feature 1..20: note = chemically synthesized
  source 1..20: mol_type = other DNA
gaagtccactcattcttggc

SEQ ID NO: 64213 - DNA, 20 bp, synthetic construct
  misc_feature 1..20: note = chemically synthesized
  source 1..20: mol_type = other DNA
tccactcattcttggcagga

SEQ ID NO: 64214 - DNA, 20 bp, synthetic construct
  misc_feature 1..20: note = chemically synthesized
  source 1..20: mol_type = other DNA
ctgctcctcctctgccttgc

SEQ ID NO: 64215 - DNA, 20 bp, synthetic construct
  misc_feature 1..20: note = chemically synthesized
  source 1..20: mol_type = other DNA
cctcctctgccttgctggac

SEQ ID NO: 64216 - DNA, 20 bp, synthetic construct
  misc_feature 1..20: note = chemically synthesized
  source 1..20: mol_type = other DNA
ctggactggtatttgtgtct

SEQ ID NO: 64217 - DNA, 20 bp, synthetic construct
  misc_feature 1..20: note = chemically synthesized
  source 1..20: mol_type = other DNA
tggactggtatttgtgtctg

SEQ ID NO: 64218 - DNA, 20 bp, synthetic construct
  misc_feature 1..20: note = chemically synthesized
  source 1..20: mol_type = other DNA
ctggtatttgtgtctgaggc

SEQ ID NO: 64219 - DNA, 20 bp, synthetic construct
  misc_feature 1..20: note = chemically synthesized
  source 1..20: mol_type = other DNA
tgtgtctgaggctggcccta

SEQ ID NO: 64220 - DNA, 20 bp, synthetic construct
  misc_feature 1..20: note = chemically synthesized
  source 1..20: mol_type = other DNA
tctgaggctggccctacggt

SEQ ID NO: 64221 - DNA, 20 bp, synthetic construct
  misc_feature 1..20: note = chemically synthesized
  source 1..20: mol_type = other DNA
gacatcccattcctacattt

SEQ ID NO: 64222 - DNA, 20 bp, synthetic construct
  misc_feature 1..20: note = chemically synthesized
  source 1..20: mol_type = other DNA
tttaagattcacgctaaatg

SEQ ID NO: 64223 - DNA, 20 bp, synthetic construct
  misc_feature 1..20: note = chemically synthesized
  source 1..20: mol_type = other DNA
aagattcacgctaaatgaag

SEQ ID NO: 64224 - DNA, 20 bp, synthetic construct
  misc_feature 1..20: note = chemically synthesized
  source 1..20: mol_type = other DNA
attcacgctaaatgaagtag

SEQ ID NO: 64225 - DNA, 20 bp, synthetic construct
  misc_feature 1..20: note = chemically synthesized
  source 1..20: mol_type = other DNA
gaagtagaagtgactccttc

SEQ ID NO: 64226 - DNA, 20 bp, synthetic construct
  misc_feature 1..20: note = chemically synthesized
  source 1..20: mol_type = other DNA
ctccttccagctttgccaac

SEQ ID NO: 64227 - DNA, 20 bp, synthetic construct
  misc_feature 1..20: note = chemically synthesized
  source 1..20: mol_type = other DNA
tgccaaccagcttttattac

SEQ ID NO: 64228 - DNA, 20 bp, synthetic construct
  misc_feature 1..20: note = chemically synthesized
  source 1..20: mol_type = other DNA
gccaaccagcttttattact

SEQ ID NO: 64229 - DNA, 20 bp, synthetic construct
  misc_feature 1..20: note = chemically synthesized
  source 1..20: mol_type = other DNA
ccaaccagcttttattacta

SEQ ID NO: 64230 - DNA, 20 bp, synthetic construct
  misc_feature 1..20: note = chemically synthesized
  source 1..20: mol_type = other DNA
ccagcttttattactagggc

SEQ ID NO: 64231 - DNA, 20 bp, synthetic construct
  misc_feature 1..20: note = chemically synthesized
  source 1..20: mol_type = other DNA
cagcttttattactagggca

SEQ ID NO: 64232 - DNA, 20 bp, synthetic construct
  misc_feature 1..20: note = chemically synthesized
  source 1..20: mol_type = other DNA
agcttttattactagggcaa

SEQ ID NO: 64233 - DNA, 20 bp, synthetic construct
  misc_feature 1..20: note = chemically synthesized
  source 1..20: mol_type = other DNA
attactagggcaagggtacc

SEQ ID NO: 64234 - DNA, 20 bp, synthetic construct
  misc_feature 1..20: note = chemically synthesized
  source 1..20: mol_type = other DNA
taattaattcaaacttcaaa

SEQ ID NO: 64235 - DNA, 20 bp, synthetic construct
  misc_feature 1..20: note = chemically synthesized
  source 1..20: mol_type = other DNA
ttcaaacttcaaaaagaatg

SEQ ID NO: 64236 - DNA, 20 bp, synthetic construct
  misc_feature 1..20: note = chemically synthesized
  source 1..20: mol_type = other DNA
aaaaagaatgaagttccact

SEQ ID NO: 64237 - DNA, 20 bp, synthetic construct
  misc_feature 1..20: note = chemically synthesized
  source 1..20: mol_type = other DNA
gaagttccactgagcttact

SEQ ID NO: 64238 - DNA, 20 bp, synthetic construct
  misc_feature 1..20: note = chemically synthesized
  source 1..20: mol_type = other DNA
ttccactgagcttactgagc

SEQ ID NO: 64239 - DNA, 20 bp, synthetic construct
  misc_feature 1..20: note = chemically synthesized
  source 1..20: mol_type = other DNA
tccactgagcttactgagct

SEQ ID NO: 64240 - DNA, 20 bp, synthetic construct
  misc_feature 1..20: note = chemically synthesized
  source 1..20: mol_type = other DNA
tgagctgggacttgaactct

SEQ ID NO: 64241 - DNA, 20 bp, synthetic construct
  misc_feature 1..20: note = chemically synthesized
  source 1..20: mol_type = other DNA
agcattctacctcattgctt

SEQ ID NO: 64242 - DNA, 20 bp, synthetic construct
  misc_feature 1..20: note = chemically synthesized
  source 1..20: mol_type = other DNA
acctcattgctttggtgcat

SEQ ID NO: 64243 - DNA, 20 bp, synthetic construct
  misc_feature 1..20: note = chemically synthesized
  source 1..20: mol_type = other DNA
cctcattgctttggtgcatt

SEQ ID NO: 64244 - DNA, 20 bp, synthetic construct
  misc_feature 1..20: note = chemically synthesized
  source 1..20: mol_type = other DNA
tgcattaggtttgtaatatc

SEQ ID NO: 64245 - DNA, 20 bp, synthetic construct
  misc_feature 1..20: note = chemically synthesized
  source 1..20: mol_type = other DNA
atctggtacctctgtttcct

SEQ ID NO: 64246 - DNA, 20 bp, synthetic construct
  misc_feature 1..20: note = chemically synthesized
  source 1..20: mol_type = other DNA
ggtacctctgtttcctcaga

SEQ ID NO: 64247 - DNA, 20 bp, synthetic construct
  misc_feature 1..20: note = chemically synthesized
  source 1..20: mol_type = other DNA
ctgtttcctcagatagatga

SEQ ID NO: 64248 - DNA, 20 bp, synthetic construct
  misc_feature 1..20: note = chemically synthesized
  source 1..20: mol_type = other DNA
tcagatagatgatagaaata

SEQ ID NO: 64249 - DNA, 20 bp, synthetic construct
  misc_feature 1..20: note = chemically synthesized
  source 1..20: mol_type = other DNA
agaaataaagatatgatatt

SEQ ID NO: 64250 - DNA, 20 bp, synthetic construct
  misc_feature 1..20: note = chemically synthesized
  source 1..20: mol_type = other DNA
gaaataaagatatgatatta

SEQ ID NO: 64251 - DNA, 20 bp, synthetic construct
  misc_feature 1..20: note = chemically synthesized
  source 1..20: mol_type = other DNA
ataaagatatgatattaagg

SEQ ID NO: 64252 - DNA, 20 bp, synthetic construct
  misc_feature 1..20: note = chemically synthesized
  source 1..20: mol_type = other DNA
agctgttaatactgaatttt

SEQ ID NO: 64253 - DNA, 20 bp, synthetic construct
  misc_feature 1..20: note = chemically synthesized
  source 1..20: mol_type = other DNA
ttaatactgaattttcagaa

SEQ ID NO: 64254 - DNA, 20 bp, synthetic construct
  misc_feature 1..20: note = chemically synthesized
  source 1..20: mol_type = other DNA
atccctccataaaatgtatt

SEQ ID NO: 64255 - DNA, 20 bp, synthetic construct
  misc_feature 1..20: note = chemically synthesized
  source 1..20: mol_type = other DNA
tccctccataaaatgtattt

SEQ ID NO: 64256 - DNA, 20 bp, synthetic construct
  misc_feature 1..20: note = chemically synthesized
  source 1..20: mol_type = other DNA
ccctccataaaatgtatttg

SEQ ID NO: 64257 - DNA, 20 bp, synthetic construct
  misc_feature 1..20: note = chemically synthesized
  source 1..20: mol_type = other DNA
cctccataaaatgtatttgg

SEQ ID NO: 64258 - DNA, 20 bp, synthetic construct
  misc_feature 1..20: note = chemically synthesized
  source 1..20: mol_type = other DNA
tgtatttgggggacaaactg

SEQ ID NO: 64259 - DNA, 20 bp, synthetic construct
  misc_feature 1..20: note = chemically synthesized
  source 1..20: mol_type = other DNA
gtatttgggggacaaactgc

SEQ ID NO: 64260 - DNA, 20 bp, synthetic construct
  misc_feature 1..20: note = chemically synthesized
  source 1..20: mol_type = other DNA
atttgggggacaaactgcag

SEQ ID NO: 64261 - DNA, 20 bp, synthetic construct
  misc_feature 1..20: note = chemically synthesized
  source 1..20: mol_type = other DNA
aactgcaggagattatattc

SEQ ID NO: 64262 - DNA, 20 bp, synthetic construct
  misc_feature 1..20: note = chemically synthesized
  source 1..20: mol_type = other DNA
gagattatattctggcccta

SEQ ID NO: 64263 - DNA, 20 bp, synthetic construct
  misc_feature 1..20: note = chemically synthesized
  source 1..20: mol_type = other DNA
atttattgattaatctttaa

SEQ ID NO: 64264 - DNA, 20 bp, synthetic construct
  misc_feature 1..20: note = chemically synthesized
  source 1..20: mol_type = other DNA
tttattgattaatctttaaa

SEQ ID NO: 64265 - DNA, 20 bp, synthetic construct
  misc_feature 1..20: note = chemically synthesized
  source 1..20: mol_type = other DNA
tgattaatctttaaaaggct

SEQ ID NO: 64266 - DNA, 20 bp, synthetic construct
  misc_feature 1..20: note = chemically synthesized
  source 1..20: mol_type = other DNA
aggcttagtgaacaatattc

SEQ ID NO: 64267 - DNA, 20 bp, synthetic construct
  misc_feature 1..20: note = chemically synthesized
  source 1..20: mol_type = other DNA
ttagtgaacaatattctagt

SEQ ID NO: 64268 - DNA, 20 bp, synthetic construct
  misc_feature 1..20: note = chemically synthesized
  source 1..20: mol_type = other DNA
tatctaattcttaaatcctc

SEQ ID NO: 64269 - DNA, 20 bp, synthetic construct
  misc_feature 1..20: note = chemically synthesized
  source 1..20: mol_type = other DNA
ctaattcttaaatcctctag

SEQ ID NO: 64270 - DNA, 20 bp, synthetic construct
  misc_feature 1..20: note = chemically synthesized
  source 1..20: mol_type = other DNA
aattaactaatactataaaa

SEQ ID NO: 64271 - DNA, 20 bp, synthetic construct
  misc_feature 1..20: note = chemically synthesized
  source 1..20: mol_type = other DNA
attaactaatactataaaat

SEQ ID NO: 64272 - DNA, 20 bp, synthetic construct
  misc_feature 1..20: note = chemically synthesized
  source 1..20: mol_type = other DNA
ctaatactataaaatgggtc

SEQ ID NO: 64273 - DNA, 20 bp, synthetic construct
  misc_feature 1..20: note = chemically synthesized
  source 1..20: mol_type = other DNA
ctataaaatgggtctggatg

SEQ ID NO: 64274 - DNA, 20 bp, synthetic construct
  misc_feature 1..20: note = chemically synthesized
  source 1..20: mol_type = other DNA
tgacattattttataacaac

SEQ ID NO: 64275 - DNA, 20 bp, synthetic construct
  misc_feature 1..20: note = chemically synthesized
  source 1..20: mol_type = other DNA
attattttataacaactggt

SEQ ID NO: 64276 - DNA, 20 bp, synthetic construct
  misc_feature 1..20: note = chemically synthesized
  source 1..20: mol_type = other DNA
tattttataacaactggtaa

SEQ ID NO: 64277 - DNA, 20 bp, synthetic construct
  misc_feature 1..20: note = chemically synthesized
  source 1..20: mol_type = other DNA
attttataacaactggtaag

SEQ ID NO: 64278 - DNA, 20 bp, synthetic construct
  misc_feature 1..20: note = chemically synthesized
  source 1..20: mol_type = other DNA
ttttataacaactggtaaga

SEQ ID NO: 64279 - DNA, 20 bp, synthetic construct
  misc_feature 1..20: note = chemically synthesized
  source 1..20: mol_type = other DNA
ttataacaactggtaagagg

SEQ ID NO: 64280 - DNA, 20 bp, synthetic construct
  misc_feature 1..20: note = chemically synthesized
  source 1..20: mol_type = other DNA
ctggtaagagggagtgacta

SEQ ID NO: 64281 - DNA, 20 bp, synthetic construct
  misc_feature 1..20: note = chemically synthesized
  source 1..20: mol_type = other DNA
agcaacaactaaaatgatct

SEQ ID NO: 64282 - DNA, 20 bp, synthetic construct
  misc_feature 1..20: note = chemically synthesized
  source 1..20: mol_type = other DNA
gcaacaactaaaatgatctc

SEQ ID NO: 64283 - DNA, 20 bp, synthetic construct
  misc_feature 1..20: note = chemically synthesized
  source 1..20: mol_type = other DNA
tgatctcaggaaaacctgtt

SEQ ID NO: 64284 - DNA, 20 bp, synthetic construct
  misc_feature 1..20: note = chemically synthesized
  source 1..20: mol_type = other DNA
aacctgtttggccctatgta

SEQ ID NO: 64285 - DNA, 20 bp, synthetic construct
  misc_feature 1..20: note = chemically synthesized
  source 1..20: mol_type = other DNA
tatggtacattacatctttt

SEQ ID NO: 64286 - DNA, 20 bp, synthetic construct
  misc_feature 1..20: note = chemically synthesized
  source 1..20: mol_type = other DNA
tttcagtaattccactcaaa

SEQ ID NO: 64287 - DNA, 20 bp, synthetic construct
  misc_feature 1..20: note = chemically synthesized
  source 1..20: mol_type = other DNA
tcagtaattccactcaaatg

SEQ ID NO: 64288 - DNA, 20 bp, synthetic construct
  misc_feature 1..20: note = chemically synthesized
  source 1..20: mol_type = other DNA
tcaaatggagacttttaaca

SEQ ID NO: 64289 - DNA, 20 bp, synthetic construct
  misc_feature 1..20: note = chemically synthesized
  source 1..20: mol_type = other DNA
tttaacaaagcaactgttct

SEQ ID NO: 64290 - DNA, 20 bp, synthetic construct
  misc_feature 1..20: note = chemically synthesized
  source 1..20: mol_type = other DNA
ttaacaaagcaactgttctc

SEQ ID NO: 64291 - DNA, 20 bp, synthetic construct
  misc_feature 1..20: note = chemically synthesized
  source 1..20: mol_type = other DNA
taacaaagcaactgttctca

SEQ ID NO: 64292 - DNA, 20 bp, synthetic construct
  misc_feature 1..20: note = chemically synthesized
  source 1..20: mol_type = other DNA
aacaaagcaactgttctcag

SEQ ID NO: 64293 - DNA, 20 bp, synthetic construct
  misc_feature 1..20: note = chemically synthesized
  source 1..20: mol_type = other DNA
aaattcattatacacatccc

SEQ ID NO: 64294 - DNA, 20 bp, synthetic construct
  misc_feature 1..20: note = chemically synthesized
  source 1..20: mol_type = other DNA
ttatacacatccctggttga

SEQ ID NO: 64295 - DNA, 20 bp, synthetic construct
  misc_feature 1..20: note = chemically synthesized
  source 1..20: mol_type = other DNA
tacacatccctggttgatag

SEQ ID NO: 64296 - DNA, 20 bp, synthetic construct
  misc_feature 1..20: note = chemically synthesized
  source 1..20: mol_type = other DNA
ctggttgatagcagtgtgtc

SEQ ID NO: 64297 - DNA, 20 bp, synthetic construct
  misc_feature 1..20: note = chemically synthesized
  source 1..20: mol_type = other DNA
ggttgatagcagtgtgtctg

SEQ ID NO: 64298 - DNA, 20 bp, synthetic construct
  misc_feature 1..20: note = chemically synthesized
  source 1..20: mol_type = other DNA
gttgatagcagtgtgtctgg

SEQ ID NO: 64299 - DNA, 20 bp, synthetic construct
  misc_feature 1..20: note = chemically synthesized
  source 1..20: mol_type = other DNA
gatagcagtgtgtctggagg

SEQ ID NO: 64300 - DNA, 20 bp, synthetic construct
  misc_feature 1..20: note = chemically synthesized
  source 1..20: mol_type = other DNA
ggcagaaaccattcttgctt

SEQ ID NO: 64301 - DNA, 20 bp, synthetic construct
  misc_feature 1..20: note = chemically synthesized
  source 1..20: mol_type = other DNA
aattacgtctgtgttatact

SEQ ID NO: 64302 - DNA, 20 bp, synthetic construct
  misc_feature 1..20: note = chemically synthesized
  source 1..20: mol_type = other DNA
tacgtctgtgttatactgag

SEQ ID NO: 64303 - DNA, 20 bp, synthetic construct
  misc_feature 1..20: note = chemically synthesized
  source 1..20: mol_type = other DNA
acgtctgtgttatactgagt

SEQ ID NO: 64304 - DNA, 20 bp, synthetic construct
  misc_feature 1..20: note = chemically synthesized
  source 1..20: mol_type = other DNA
cgtctgtgttatactgagta

SEQ ID NO: 64305 - DNA, 20 bp, synthetic construct
  misc_feature 1..20: note = chemically synthesized
  source 1..20: mol_type = other DNA
ctgtgttatactgagtaggg

SEQ ID NO: 64306 - DNA, 20 bp, synthetic construct
  misc_feature 1..20: note = chemically synthesized
  source 1..20: mol_type = other DNA
gacacttacgttcctgataa

SEQ ID NO: 64307 - DNA, 20 bp, synthetic construct
  misc_feature 1..20: note = chemically synthesized
  source 1..20: mol_type = other DNA
acacttacgttcctgataat

SEQ ID NO: 64308 - DNA, 20 bp, synthetic construct
  misc_feature 1..20: note = chemically synthesized
  source 1..20: mol_type = other DNA
tacgttcctgataatgggat

SEQ ID NO: 64309 - DNA, 20 bp, synthetic construct
  misc_feature 1..20: note = chemically synthesized
  source 1..20: mol_type = other DNA
gtgtaattcttgtttcgctc

SEQ ID NO: 64310 - DNA, 20 bp, synthetic construct
  misc_feature 1..20: note = chemically synthesized
  source 1..20: mol_type = other DNA
tccagatttctaataccaca

SEQ ID NO: 64311 - DNA, 20 bp, synthetic construct
  misc_feature 1..20: note = chemically synthesized
  source 1..20: mol_type = other DNA
tcacgtgtcttctctacacc

SEQ ID NO: 64312 - DNA, 20 bp, synthetic construct
  misc_feature 1..20: note = chemically synthesized
  source 1..20: mol_type = other DNA
cacgtgtcttctctacaccc

SEQ ID NO: 64313 - DNA, 20 bp, synthetic construct
  misc_feature 1..20: note = chemically synthesized
  source 1..20: mol_type = other DNA
acgtgtcttctctacaccca

SEQ ID NO: 64314 - DNA, 20 bp, synthetic construct
  misc_feature 1..20: note = chemically synthesized
  source 1..20: mol_type = other DNA
cttctctacacccagggcac

SEQ ID NO: 64315 - DNA, 20 bp, synthetic construct
  misc_feature 1..20: note = chemically synthesized
  source 1..20: mol_type = other DNA
cccagggcaccggtgaatcc

SEQ ID NO: 64316 - DNA, 20 bp, synthetic construct
  misc_feature 1..20: note = chemically synthesized
  source 1..20: mol_type = other DNA
tgaatccaagtgtcctctga

SEQ ID NO: 64317 - DNA, 20 bp, synthetic construct
  misc_feature 1..20: note = chemically synthesized
  source 1..20: mol_type = other DNA
caagtgtcctctgatggtca

SEQ ID NO: 64318 - DNA, 20 bp, synthetic construct
  misc_feature 1..20: note = chemically synthesized
  source 1..20: mol_type = other DNA
tcctctgatggtcaaagttc

SEQ ID NO: 64319 - DNA, 20 bp, synthetic construct
  misc_feature 1..20: note = chemically synthesized
  source 1..20: mol_type = other DNA
caaagttctagatgctgtcc

SEQ ID NO: 64320 - DNA, 20 bp, synthetic construct
  misc_feature 1..20: note = chemically synthesized
  source 1..20: mol_type = other DNA
aaagttctagatgctgtccg

SEQ ID NO: 64321 - DNA, 20 bp, synthetic construct
  misc_feature 1..20: note = chemically synthesized
  source 1..20: mol_type = other DNA
gttctagatgctgtccgagg

SEQ ID NO: 64322 - DNA, 20 bp, synthetic construct
  misc_feature 1..20: note = chemically synthesized
  source 1..20: mol_type = other DNA
aggcagtcctgccatcaatg

SEQ ID NO: 64323 - DNA, 20 bp, synthetic construct
  misc_feature 1..20: note = chemically synthesized
  source 1..20: mol_type = other DNA
aatgtggccgtgcatgtgtt

SEQ ID NO: 64324 - DNA, 20 bp, synthetic construct
  misc_feature 1..20: note = chemically synthesized
  source 1..20: mol_type = other DNA
tggccgtgcatgtgttcaga

SEQ ID NO: 64325 - DNA, 20 bp, synthetic construct
  misc_feature 1..20: note = chemically synthesized
  source 1..20: mol_type = other DNA
ggccgtgcatgtgttcagaa

SEQ ID NO: 64326 - DNA, 20 bp, synthetic construct
  misc_feature 1..20: note = chemically synthesized
  source 1..20: mol_type = other DNA
gaaaggctgctgatgacacc

SEQ ID NO: 64327 - DNA, 20 bp, synthetic construct
  misc_feature 1..20: note = chemically synthesized
  source 1..20: mol_type = other DNA
aaaggctgctgatgacacct

SEQ ID NO: 64328 - DNA, 20 bp, synthetic construct
  misc_feature 1..20: note = chemically synthesized
  source 1..20: mol_type = other DNA
aggctgctgatgacacctgg

SEQ ID NO: 64329 - DNA, 20 bp, synthetic construct
  misc_feature 1..20: note = chemically synthesized
  source 1..20: mol_type = other DNA
acctgggagccatttgcctc

SEQ ID NO: 64330 - DNA, 20 bp, synthetic construct
  misc_feature 1..20: note = chemically synthesized
  source 1..20: mol_type = other DNA
aaatggctcccaggtgtcat

SEQ ID NO: 64331 - DNA, 20 bp, synthetic construct
  misc_feature 1..20: note = chemically synthesized
  source 1..20: mol_type = other DNA
tggctcccaggtgtcatcag

SEQ ID NO: 64332 - DNA, 20 bp, synthetic construct
  misc_feature 1..20: note = chemically synthesized
  source 1..20: mol_type = other DNA
agcctttctgaacacatgca

SEQ ID NO: 64333 - DNA, 20 bp, synthetic construct
  misc_feature 1..20: note = chemically synthesized
  source 1..20: mol_type = other DNA
cacatgcacggccacattga

SEQ ID NO: 64334 - DNA, 20 bp, synthetic construct
  misc_feature 1..20: note = chemically synthesized
  source 1..20: mol_type = other DNA
atgcacggccacattgatgg

SEQ ID NO: 64335 - DNA, 20 bp, synthetic construct
  misc_feature 1..20: note = chemically synthesized
  source 1..20: mol_type = other DNA
tgcacggccacattgatggc

SEQ ID NO: 64336 - DNA, 20 bp, synthetic construct
  misc_feature 1..20: note = chemically synthesized
  source 1..20: mol_type = other DNA
cattgatggcaggactgcct

SEQ ID NO: 64337 - DNA, 20 bp, synthetic construct
  misc_feature 1..20: note = chemically synthesized
  source 1..20: mol_type = other DNA
gatggcaggactgcctcgga

SEQ ID NO: 64338 - DNA, 20 bp, synthetic construct
  misc_feature 1..20: note = chemically synthesized
  source 1..20: mol_type = other DNA
ggactgcctcggacagcatc

SEQ ID NO: 64339 - DNA, 20 bp, synthetic construct
  misc_feature 1..20: note = chemically synthesized
  source 1..20: mol_type = other DNA
gcatctagaactttgaccat

SEQ ID NO: 64340 - DNA, 20 bp, synthetic construct
  misc_feature 1..20: note = chemically synthesized
  source 1..20: mol_type = other DNA
atctagaactttgaccatca

SEQ ID NO: 64341 - DNA, 20 bp, synthetic construct
  misc_feature 1..20: note = chemically synthesized
  source 1..20: mol_type = other DNA
tctagaactttgaccatcag

SEQ ID NO: 64342 - DNA, 20 bp, synthetic construct
  misc_feature 1..20: note = chemically synthesized
  source 1..20: mol_type = other DNA
tttgaccatcagaggacact

SEQ ID NO: 64343 - DNA, 20 bp, synthetic construct
  misc_feature 1..20: note = chemically synthesized
  source 1..20: mol_type = other DNA
cagaggacacttggattcac

SEQ ID NO: 64344 - DNA, 20 bp, synthetic construct
  misc_feature 1..20: note = chemically synthesized
  source 1..20: mol_type = other DNA
acttggattcaccggtgccc

SEQ ID NO: 64345 - DNA, 20 bp, synthetic construct
  misc_feature 1..20: note = chemically synthesized
  source 1..20: mol_type = other DNA
cttggattcaccggtgccct

SEQ ID NO: 64346 - DNA, 20 bp, synthetic construct
  misc_feature 1..20: note = chemically synthesized
  source 1..20: mol_type = other DNA
attcaccggtgccctgggtg

SEQ ID NO: 64347 - DNA, 20 bp, synthetic construct
  misc_feature 1..20: note = chemically synthesized
  source 1..20: mol_type = other DNA
tcaccggtgccctgggtgta

SEQ ID NO: 64348 - DNA, 20 bp, synthetic construct
  misc_feature 1..20: note = chemically synthesized
  source 1..20: mol_type = other DNA
ccggtgccctgggtgtagag

SEQ ID NO: 64349 - DNA, 20 bp, synthetic construct
  misc_feature 1..20: note = chemically synthesized
  source 1..20: mol_type = other DNA
tgggtgtagagaagacacgt

SEQ ID NO: 64350 - DNA, 20 bp, synthetic construct
  misc_feature 1..20: note = chemically synthesized
  source 1..20: mol_type = other DNA
gtgtagagaagacacgtgag

SEQ ID NO: 64351 - DNA, 20 bp, synthetic construct
  misc_feature 1..20: note = chemically synthesized
  source 1..20: mol_type = other DNA
gagaagttaacaaaattgat

SEQ ID NO: 64352 - DNA, 20 bp, synthetic construct
  misc_feature 1..20: note = chemically synthesized
  source 1..20: mol_type = other DNA
gaagttaacaaaattgatca

SEQ ID NO: 64353 - DNA, 20 bp, synthetic construct
  misc_feature 1..20: note = chemically synthesized
  source 1..20: mol_type = other DNA
aacaaaattgatcagagtga

SEQ ID NO: 64354 - DNA, 20 bp, synthetic construct
  misc_feature 1..20: note = chemically synthesized
  source 1..20: mol_type = other DNA
acaaaattgatcagagtgaa

SEQ ID NO: 64355 - DNA, 20 bp, synthetic construct
  misc_feature 1..20: note = chemically synthesized
  source 1..20: mol_type = other DNA
gtgaaaggatttattctttg

SEQ ID NO: 64356 - DNA, 20 bp, synthetic construct
  misc_feature 1..20: note = chemically synthesized
  source 1..20: mol_type = other DNA
ggatttattctttgtggtat

SEQ ID NO: 64357 - DNA, 20 bp, synthetic construct
  misc_feature 1..20: note = chemically synthesized
  source 1..20: mol_type = other DNA
tctttgtggtattagaaatc

SEQ ID NO: 64358 - DNA, 20 bp, synthetic construct
  misc_feature 1..20: note = chemically synthesized
  source 1..20: mol_type = other DNA
tttgtggtattagaaatctg

SEQ ID NO: 64359 - DNA, 20 bp, synthetic construct
  misc_feature 1..20: note = chemically synthesized
  source 1..20: mol_type = other DNA
ttagaaatctggagcgaaac

SEQ ID NO: 64360 - DNA, 20 bp, synthetic construct
  misc_feature 1..20: note = chemically synthesized
  source 1..20: mol_type = other DNA
ttacacactgatcccattat

SEQ ID NO: 64361 - DNA, 20 bp, synthetic construct
  misc_feature 1..20: note = chemically synthesized
  source 1..20: mol_type = other DNA
tacacactgatcccattatc

SEQ ID NO: 64362 - DNA, 20 bp, synthetic construct
  misc_feature 1..20: note = chemically synthesized
  source 1..20: mol_type = other DNA
gatcccattatcaggaacgt

SEQ ID NO: 64363 - DNA, 20 bp, synthetic construct
  misc_feature 1..20: note = chemically synthesized
  source 1..20: mol_type = other DNA
cgtaagtgtcgacaattaat

SEQ ID NO: 64364 - DNA, 20 bp, synthetic construct
  misc_feature 1..20: note = chemically synthesized
  source 1..20: mol_type = other DNA
aattaatgagcttccctact

SEQ ID NO: 64365 - DNA, 20 bp, synthetic construct
  misc_feature 1..20: note = chemically synthesized
  source 1..20: mol_type = other DNA
cttccctactcagtataaca

SEQ ID NO: 64366 - DNA, 20 bp, synthetic construct
  misc_feature 1..20: note = chemically synthesized
  source 1..20: mol_type = other DNA
cacagacgtaattgtttcca

SEQ ID NO: 64367 - DNA, 20 bp, synthetic construct
  misc_feature 1..20: note = chemically synthesized
  source 1..20: mol_type = other DNA
gacgtaattgtttccaaagc

SEQ ID NO: 64368 - DNA, 20 bp, synthetic construct
  misc_feature 1..20: note = chemically synthesized
  source 1..20: mol_type = other DNA
aattgtttccaaagcaagaa

SEQ ID NO: 64369 - DNA, 20 bp, synthetic construct
  misc_feature 1..20: note = chemically synthesized
  source 1..20: mol_type = other DNA
gcaagaatggtttctgcctc

SEQ ID NO: 64370 - DNA, 20 bp, synthetic construct
  misc_feature 1..20: note = chemically synthesized
  source 1..20: mol_type = other DNA
ccagacacactgctatcaac

SEQ ID NO: 64371 - DNA, 20 bp, synthetic construct
  misc_feature 1..20: note = chemically synthesized
  source 1..20: mol_type = other DNA
cagacacactgctatcaacc

SEQ ID NO: 64372 - DNA, 20 bp, synthetic construct
  misc_feature 1..20: note = chemically synthesized
  source 1..20: mol_type = other DNA
agacacactgctatcaacca

SEQ ID NO: 64373 - DNA, 20 bp, synthetic construct
  misc_feature 1..20: note = chemically synthesized
  source 1..20: mol_type = other DNA
ggatgtgtataatgaatttt

SEQ ID NO: 64374 - DNA, 20 bp, synthetic construct
  misc_feature 1..20: note = chemically synthesized
  source 1..20: mol_type = other DNA
gatgtgtataatgaatttta

SEQ ID NO: 64375 - DNA, 20 bp, synthetic construct
  misc_feature 1..20: note = chemically synthesized
  source 1..20: mol_type = other DNA
atgtgtataatgaattttaa

SEQ ID NO: 64376 - DNA, 20 bp, synthetic construct
  misc_feature 1..20: note = chemically synthesized
  source 1..20: mol_type = other DNA
gtgtataatgaattttaagg

SEQ ID NO: 64377 - DNA, 20 bp, synthetic construct
  misc_feature 1..20: note = chemically synthesized
  source 1..20: mol_type = other DNA
atgaattttaagggagaaaa

SEQ ID NO: 64378 - DNA, 20 bp, synthetic construct
  misc_feature 1..20: note = chemically synthesized
  source 1..20: mol_type = other DNA
tgaattttaagggagaaaat

SEQ ID NO: 64379 - DNA, 20 bp, synthetic construct
  misc_feature 1..20: note = chemically synthesized
  source 1..20: mol_type = other DNA
agggagaaaataggtcccct

SEQ ID NO: 64380 - DNA, 20 bp, synthetic construct
  misc_feature 1..20: note = chemically synthesized
  source 1..20: mol_type = other DNA
gaaaataggtcccctgagaa

SEQ ID NO: 64381 - DNA, 20 bp, synthetic construct
  misc_feature 1..20: note = chemically synthesized
  source 1..20: mol_type = other DNA
gagaacagttgctttgttaa

SEQ ID NO: 64382 - DNA, 20 bp, synthetic construct
  misc_feature 1..20: note = chemically synthesized
  source 1..20: mol_type = other DNA
tttgttaaaagtctccattt

SEQ ID NO: 64383 - DNA, 20 bp, synthetic construct
  misc_feature 1..20: note = chemically synthesized
  source 1..20: mol_type = other DNA
gttaaaagtctccatttgag

SEQ ID NO: 64384 - DNA, 20 bp, synthetic construct
  misc_feature 1..20: note = chemically synthesized
  source 1..20: mol_type = other DNA
atttgagtggaattactgaa

SEQ ID NO: 64385 - DNA, 20 bp, synthetic construct
  misc_feature 1..20: note = chemically synthesized
  source 1..20: mol_type = other DNA
aagatgtaatgtaccataca

SEQ ID NO: 64386 - DNA, 20 bp, synthetic construct
  misc_feature 1..20: note = chemically synthesized
  source 1..20: mol_type = other DNA
agatgtaatgtaccatacat

SEQ ID NO: 64387 - DNA, 20 bp, synthetic construct
  misc_feature 1..20: note = chemically synthesized
  source 1..20: mol_type = other DNA
gatgtaatgtaccatacata

SEQ ID NO: 64388 - DNA, 20 bp, synthetic construct
  misc_feature 1..20: note = chemically synthesized
  source 1..20: mol_type = other DNA
gtaccatacatagggccaaa

SEQ ID NO: 64389 - DNA, 20 bp, synthetic construct
  misc_feature 1..20: note = chemically synthesized
  source 1..20: mol_type = other DNA
taccatacatagggccaaac

SEQ ID NO: 64390 - DNA, 20 bp, synthetic construct
  misc_feature 1..20: note = chemically synthesized
  source 1..20: mol_type = other DNA
agggccaaacaggttttcct

SEQ ID NO: 64391 - DNA, 20 bp, synthetic construct
  misc_feature 1..20: note = chemically synthesized
  source 1..20: mol_type = other DNA
aggttttcctgagatcattt

SEQ ID NO: 64392 - DNA, 20 bp, synthetic construct
  misc_feature 1..20: note = chemically synthesized
  source 1..20: mol_type = other DNA
gatcattttagttgttgcta

SEQ ID NO: 64393 - DNA, 20 bp, synthetic construct
  misc_feature 1..20: note = chemically synthesized
  source 1..20: mol_type = other DNA
ctatagtcactccctcttac

SEQ ID NO: 64394 - DNA, 20 bp, synthetic construct
  misc_feature 1..20: note = chemically synthesized
  source 1..20: mol_type = other DNA
cagttgttataaaataatgt

SEQ ID NO: 64395 - DNA, 20 bp, synthetic construct
  misc_feature 1..20: note = chemically synthesized
  source 1..20: mol_type = other DNA
aataatgtcagaactacatc

SEQ ID NO: 64396 - DNA, 20 bp, synthetic construct
  misc_feature 1..20: note = chemically synthesized
  source 1..20: mol_type = other DNA
ctacatccagacccatttta

SEQ ID NO: 64397 - DNA, 20 bp, synthetic construct
  misc_feature 1..20: note = chemically synthesized
  source 1..20: mol_type = other DNA
ccagacccattttatagtat

SEQ ID NO: 64398 - DNA, 20 bp, synthetic construct
  misc_feature 1..20: note = chemically synthesized
  source 1..20: mol_type = other DNA
atagtattagttaattcttc

SEQ ID NO: 64399 - DNA, 20 bp, synthetic construct
  misc_feature 1..20: note = chemically synthesized
  source 1..20: mol_type = other DNA
agtattagttaattcttcta

SEQ ID NO: 64400 - DNA, 20 bp, synthetic construct
  misc_feature 1..20: note = chemically synthesized
  source 1..20: mol_type = other DNA
gtattagttaattcttctag

SEQ ID NO: 64401 - DNA, 20 bp, synthetic construct
  misc_feature 1..20: note = chemically synthesized
  source 1..20: mol_type = other DNA
ttaattcttctagaggattt

SEQ ID NO: 64402 - DNA, 20 bp, synthetic construct
  misc_feature 1..20: note = chemically synthesized
  source 1..20: mol_type = other DNA
cttctagaggatttaagaat

SEQ ID NO: 64403 - DNA, 20 bp, synthetic construct
  misc_feature 1..20: note = chemically synthesized
  source 1..20: mol_type = other DNA
ttaagaattagatatctgac

SEQ ID NO: 64404 - DNA, 20 bp, synthetic construct
  misc_feature 1..20: note = chemically synthesized
  source 1..20: mol_type = other DNA
tgactagaatattgttcact

SEQ ID NO: 64405 - DNA, 20 bp, synthetic construct
  misc_feature 1..20: note = chemically synthesized
  source 1..20: mol_type = other DNA
attgttcactaagcctttta

SEQ ID NO: 64406 - DNA, 20 bp, synthetic construct
  misc_feature 1..20: note = chemically synthesized
  source 1..20: mol_type = other DNA
aaatacgttttgaataacta

SEQ ID NO: 64407 - DNA, 20 bp, synthetic construct
  misc_feature 1..20: note = chemically synthesized
  source 1..20: mol_type = other DNA
aatacgttttgaataactat

SEQ ID NO: 64408 - DNA, 20 bp, synthetic construct
  misc_feature 1..20: note = chemically synthesized
  source 1..20: mol_type = other DNA
atacgttttgaataactata

SEQ ID NO: 64409 - DNA, 20 bp, synthetic construct
  misc_feature 1..20: note = chemically synthesized
  source 1..20: mol_type = other DNA
gttttgaataactatagggc

SEQ ID NO: 64410 - DNA, 20 bp, synthetic construct
  misc_feature 1..20: note = chemically synthesized
  source 1..20: mol_type = other DNA
ggccagaatataatctcctg

SEQ ID NO: 64411 - DNA, 20 bp, synthetic construct
  misc_feature 1..20: note = chemically synthesized
  source 1..20: mol_type = other DNA
tgtcccccaaatacatttta

SEQ ID NO: 64412 - DNA, 20 bp, synthetic construct
  misc_feature 1..20: note = chemically synthesized
  source 1..20: mol_type = other DNA
tcccccaaatacattttatg

SEQ ID NO: 64413 - DNA, 20 bp, synthetic construct
  misc_feature 1..20: note = chemically synthesized
  source 1..20: mol_type = other DNA
cccccaaatacattttatgg

SEQ ID NO: 64414 - DNA, 20 bp, synthetic construct
  misc_feature 1..20: note = chemically synthesized
  source 1..20: mol_type = other DNA
ccccaaatacattttatgga

SEQ ID NO: 64415 - DNA, 20 bp, synthetic construct
  misc_feature 1..20: note = chemically synthesized
  source 1..20: mol_type = other DNA
gggatacttttctgaaaatt

SEQ ID NO: 64416 - DNA, 20 bp, synthetic construct
  misc_feature 1..20: note = chemically synthesized
  source 1..20: mol_type = other DNA
ttctgaaaattcagtattaa

SEQ ID NO: 64417 - DNA, 20 bp, synthetic construct
  misc_feature 1..20: note = chemically synthesized
  source 1..20: mol_type = other DNA
tttatttctatcatctatct

SEQ ID NO: 64418 - DNA, 20 bp, synthetic construct
  misc_feature 1..20: note = chemically synthesized
  source 1..20: mol_type = other DNA
ttatttctatcatctatctg

SEQ ID NO: 64419 - DNA, 20 bp, synthetic construct
  misc_feature 1..20: note = chemically synthesized
  source 1..20: mol_type = other DNA
ctatcatctatctgaggaaa

SEQ ID NO: 64420 - DNA, 20 bp, synthetic construct
  misc_feature 1..20: note = chemically synthesized
  source 1..20: mol_type = other DNA
atcatctatctgaggaaaca

SEQ ID NO: 64421 - DNA, 20 bp, synthetic construct
  misc_feature 1..20: note = chemically synthesized
  source 1..20: mol_type = other DNA
tcatctatctgaggaaacag

SEQ ID NO: 64422 - DNA, 20 bp, synthetic construct
  misc_feature 1..20: note = chemically synthesized
  source 1..20: mol_type = other DNA
atctgaggaaacagaggtac

SEQ ID NO: 64423 - DNA, 20 bp, synthetic construct
  misc_feature 1..20: note = chemically synthesized
  source 1..20: mol_type = other DNA
attacaaacctaatgcacca

SEQ ID NO: 64424 - DNA, 20 bp, synthetic construct
  misc_feature 1..20: note = chemically synthesized
  source 1..20: mol_type = other DNA
acctaatgcaccaaagcaat

SEQ ID NO: 64425 - DNA, 20 bp, synthetic construct
  misc_feature 1..20: note = chemically synthesized
  source 1..20: mol_type = other DNA
cctaatgcaccaaagcaatg

SEQ ID NO: 64426 - DNA, 20 bp, synthetic construct
  misc_feature 1..20: note = chemically synthesized
  source 1..20: mol_type = other DNA
aatgcaccaaagcaatgagg

SEQ ID NO: 64427 - DNA, 20 bp, synthetic construct
  misc_feature 1..20: note = chemically synthesized
  source 1..20: mol_type = other DNA
aagcaatgaggtagaatgct

SEQ ID NO: 64428 - DNA, 20 bp, synthetic construct
  misc_feature 1..20: note = chemically synthesized
  source 1..20: mol_type = other DNA
gcaatgaggtagaatgctca

SEQ ID NO: 64429 - DNA, 20 bp, synthetic construct
  misc_feature 1..20: note = chemically synthesized
  source 1..20: mol_type = other DNA
aggtagaatgctcagagttc

SEQ ID NO: 64430 - DNA, 20 bp, synthetic construct
  misc_feature 1..20: note = chemically synthesized
  source 1..20: mol_type = other DNA
aatgctcagagttcaagtcc

SEQ ID NO: 64431 - DNA, 20 bp, synthetic construct
  misc_feature 1..20: note = chemically synthesized
  source 1..20: mol_type = other DNA
tcagagttcaagtcccagct

SEQ ID NO: 64432 - DNA, 20 bp, synthetic construct
  misc_feature 1..20: note = chemically synthesized
  source 1..20: mol_type = other DNA
agttcaagtcccagctcagt

SEQ ID NO: 64433 - DNA, 20 bp, synthetic construct
  misc_feature 1..20: note = chemically synthesized
  source 1..20: mol_type = other DNA
aagtcccagctcagtaagct

SEQ ID NO: 64434 - DNA, 20 bp, synthetic construct
  misc_feature 1..20: note = chemically synthesized
  source 1..20: mol_type = other DNA
tcccagctcagtaagctcag

SEQ ID NO: 64435 - DNA, 20 bp, synthetic construct
  misc_feature 1..20: note = chemically synthesized
  source 1..20: mol_type = other DNA
gtggaacttcattctttttg

SEQ ID NO: 64436 - DNA, 20 bp, synthetic construct
  misc_feature 1..20: note = chemically synthesized
  source 1..20: mol_type = other DNA
tgaattaattatattaaaaa

SEQ ID NO: 64437 - DNA, 20 bp, synthetic construct
  misc_feature 1..20: note = chemically synthesized
  source 1..20: mol_type = other DNA
attatattaaaaatagatgc

SEQ ID NO: 64438 - DNA, 20 bp, synthetic construct
  misc_feature 1..20: note = chemically synthesized
  source 1..20: mol_type = other DNA
ttatattaaaaatagatgct

SEQ ID NO: 64439 - DNA, 20 bp, synthetic construct
  misc_feature 1..20: note = chemically synthesized
  source 1..20: mol_type = other DNA
gatgctgggtacccttgccc

SEQ ID NO: 64440 - DNA, 20 bp, synthetic construct
  misc_feature 1..20: note = chemically synthesized
  source 1..20: mol_type = other DNA
tacccttgccctagtaataa

SEQ ID NO: 64441 - DNA, 20 bp, synthetic construct
  misc_feature 1..20: note = chemically synthesized
  source 1..20: mol_type = other DNA
cttgccctagtaataaaagc

SEQ ID NO: 64442 - DNA, 20 bp, synthetic construct
  misc_feature 1..20: note = chemically synthesized
  source 1..20: mol_type = other DNA
ccctagtaataaaagctggt

SEQ ID NO: 64443 - DNA, 20 bp, synthetic construct
  misc_feature 1..20: note = chemically synthesized
  source 1..20: mol_type = other DNA
gtaataaaagctggttggca

SEQ ID NO: 64444 - DNA, 20 bp, synthetic construct
  misc_feature 1..20: note = chemically synthesized
  source 1..20: mol_type = other DNA
taaaagctggttggcaaagc

SEQ ID NO: 64445 - DNA, 20 bp, synthetic construct
  misc_feature 1..20: note = chemically synthesized
  source 1..20: mol_type = other DNA
aagctggttggcaaagctgg

SEQ ID NO: 64446 - DNA, 20 bp, synthetic construct
  misc_feature 1..20: note = chemically synthesized
  source 1..20: mol_type = other DNA
agctggttggcaaagctgga

SEQ ID NO: 64447 - DNA, 20 bp, synthetic construct
  misc_feature 1..20: note = chemically synthesized
  source 1..20: mol_type = other DNA
ctggttggcaaagctggaag

SEQ ID NO: 64448 - DNA, 20 bp, synthetic construct
  misc_feature 1..20: note = chemically synthesized
  source 1..20: mol_type = other DNA
ggagtcacttctacttcatt

SEQ ID NO: 64449 - DNA, 20 bp, synthetic construct
  misc_feature 1..20: note = chemically synthesized
  source 1..20: mol_type = other DNA
tttagcgtgaatcttaaatg

SEQ ID NO: 64450 - DNA, 20 bp, synthetic construct
  misc_feature 1..20: note = chemically synthesized
  source 1..20: mol_type = other DNA
ttagcgtgaatcttaaatgt

SEQ ID NO: 64451 - DNA, 20 bp, synthetic construct
  misc_feature 1..20: note = chemically synthesized
  source 1..20: mol_type = other DNA
gtgaatcttaaatgtaggaa

SEQ ID NO: 64452 - DNA, 20 bp, synthetic construct
  misc_feature 1..20: note = chemically synthesized
  source 1..20: mol_type = other DNA
tgaatcttaaatgtaggaat

SEQ ID NO: 64453 - DNA, 20 bp, synthetic construct
  misc_feature 1..20: note = chemically synthesized
  source 1..20: mol_type = other DNA
aatgtaggaatgggatgtca

SEQ ID NO: 64454 - DNA, 20 bp, synthetic construct
  misc_feature 1..20: note = chemically synthesized
  source 1..20: mol_type = other DNA
tgtcacagaaacactcaccg

SEQ ID NO: 64455 - DNA, 20 bp, synthetic construct
  misc_feature 1..20: note = chemically synthesized
  source 1..20: mol_type = other DNA
gtcacagaaacactcaccgt

SEQ ID NO: 64456 - DNA, 20 bp, synthetic construct
  misc_feature 1..20: note = chemically synthesized
  source 1..20: mol_type = other DNA
tcacagaaacactcaccgta

SEQ ID NO: 64457 - DNA, 20 bp, synthetic construct
  misc_feature 1..20: note = chemically synthesized
  source 1..20: mol_type = other DNA
agaaacactcaccgtagggc

SEQ ID NO: 64458 - DNA, 20 bp, synthetic construct
  misc_feature 1..20: note = chemically synthesized
  source 1..20: mol_type = other DNA
actcaccgtagggccagcct

SEQ ID NO: 64459 - DNA, 20 bp, synthetic construct
  misc_feature 1..20: note = chemically synthesized
  source 1..20: mol_type = other DNA
ccagcctcagacacaaatac

SEQ ID NO: 64460 - DNA, 20 bp, synthetic construct
  misc_feature 1..20: note = chemically synthesized
  source 1..20: mol_type = other DNA
ctcagacacaaataccagtc

SEQ ID NO: 64461 - DNA, 20 bp, synthetic construct
  misc_feature 1..20: note = chemically synthesized
  source 1..20: mol_type = other DNA
gacacaaataccagtccagc

SEQ ID NO: 64462 - DNA, 20 bp, synthetic construct
  misc_feature 1..20: note = chemically synthesized
  source 1..20: mol_type = other DNA
acacaaataccagtccagca

SEQ ID NO: 64463 - DNA, 20 bp, synthetic construct
  misc_feature 1..20: note = chemically synthesized
  source 1..20: mol_type = other DNA
caaataccagtccagcaagg

SEQ ID NO: 64464 - DNA, 20 bp, synthetic construct
  misc_feature 1..20: note = chemically synthesized
  source 1..20: mol_type = other DNA
aataccagtccagcaaggca

SEQ ID NO: 64465 - DNA, 20 bp, synthetic construct
  misc_feature 1..20: note = chemically synthesized
  source 1..20: mol_type = other DNA
ataccagtccagcaaggcag

SEQ ID NO: 64466 - DNA, 20 bp, synthetic construct
  misc_feature 1..20: note = chemically synthesized
  source 1..20: mol_type = other DNA
accagtccagcaaggcagag

SEQ ID NO: 64467 - DNA, 20 bp, synthetic construct
  misc_feature 1..20: note = chemically synthesized
  source 1..20: mol_type = other DNA
ccagtccagcaaggcagagg

SEQ ID NO: 64468 - DNA, 20 bp, synthetic construct
  misc_feature 1..20: note = chemically synthesized
  source 1..20: mol_type = other DNA
agtccagcaaggcagaggag

SEQ ID NO: 64469 - DNA, 20 bp, synthetic construct
  misc_feature 1..20: note = chemically synthesized
  source 1..20: mol_type = other DNA
ccagcaaggcagaggaggag

SEQ ID NO: 64470 - DNA, 20 bp, synthetic construct
  misc_feature 1..20: note = chemically synthesized
  source 1..20: mol_type = other DNA
gcagaggaggagcagacgat

SEQ ID NO: 64471 - DNA, 20 bp, synthetic construct
  misc_feature 1..20: note = chemically synthesized
  source 1..20: mol_type = other DNA
gaggaggagcagacgatgag

SEQ ID NO: 64472 - DNA, 20 bp, synthetic construct
  misc_feature 1..20: note = chemically synthesized
  source 1..20: mol_type = other DNA
cgatgagaagccatcctgcc

SEQ ID NO: 64473 - DNA, 20 bp, synthetic construct
  misc_feature 1..20: note = chemically synthesized
  source 1..20: mol_type = other DNA
gaagccatcctgccaagaat

SEQ ID NO: 64474 - DNA, 20 bp, synthetic construct
  misc_feature 1..20: note = chemically synthesized
  source 1..20: mol_type = other DNA
gccatcctgccaagaatgag

SEQ ID NO: 64475 - DNA, 20 bp, synthetic construct
  misc_feature 1..20: note = chemically synthesized
  source 1..20: mol_type = other DNA
gaatgagtggacttctgtga

SEQ ID NO: 64476 - DNA, 20 bp, synthetic construct
  misc_feature 1..20: note = chemically synthesized
  source 1..20: mol_type = other DNA
acttctgtgatggctgctcc

SEQ ID NO: 64477 - DNA, 20 bp, synthetic construct
  misc_feature 1..20: note = chemically synthesized
  source 1..20: mol_type = other DNA
tgtgatggctgctcccagcc

SEQ ID NO: 64478 - DNA, 20 bp, synthetic construct
  misc_feature 1..20: note = chemically synthesized
  source 1..20: mol_type = other DNA
gtgatggctgctcccagcct

SEQ ID NO: 64479 - DNA, 20 bp, synthetic construct
  misc_feature 1..20: note = chemically synthesized
  source 1..20: mol_type = other DNA
tgatggctgctcccagcctg

SEQ ID NO: 64480 - DNA, 20 bp, synthetic construct
  misc_feature 1..20: note = chemically synthesized
  source 1..20: mol_type = other DNA
cttttatactcacttctcct

SEQ ID NO: 64481 - DNA, 20 bp, synthetic construct
  misc_feature 1..20: note = chemically synthesized
  source 1..20: mol_type = other DNA
tatactcacttctcctgagc

SEQ ID NO: 64482 - DNA, 20 bp, synthetic construct
  misc_feature 1..20: note = chemically synthesized
  source 1..20: mol_type = other DNA
atactcacttctcctgagct

SEQ ID NO: 64483 - DNA, 20 bp, synthetic construct
  misc_feature 1..20: note = chemically synthesized
  source 1..20: mol_type = other DNA
gctgattctgattattgact

SEQ ID NO: 64484 - DNA, 20 bp, synthetic construct
  misc_feature 1..20: note = chemically synthesized
  source 1..20: mol_type = other DNA
aggtttgcagtcagattggc

SEQ ID NO: 64485 - DNA, 20 bp, synthetic construct
  misc_feature 1..20: note = chemically synthesized
  source 1..20: mol_type = other DNA
agcagcctagctcaggagaa

SEQ ID NO: 64486 - DNA, 20 bp, synthetic construct
  misc_feature 1..20: note = chemically synthesized
  source 1..20: mol_type = other DNA
agaagtccactcattcttgg

SEQ ID NO: 64487 - DNA, 20 bp, synthetic construct
  misc_feature 1..20: note = chemically synthesized
  source 1..20: mol_type = other DNA
tgtctgaggctggccctacg

SEQ ID NO: 64488 - DNA, 20 bp, synthetic construct
  misc_feature 1..20: note = chemically synthesized
  source 1..20: mol_type = other DNA
ccagcttttattactagggc

SEQ ID NO: 64489 - DNA, 20 bp, synthetic construct
  misc_feature 1..20: note = chemically synthesized
  source 1..20: mol_type = other DNA
taattaattcaaacttcaaa

SEQ ID NO: 64490 - DNA, 20 bp, synthetic construct
  misc_feature 1..20: note = chemically synthesized
  source 1..20: mol_type = other DNA
tattaaggaagctgttaata

SEQ ID NO: 64491 - DNA, 20 bp, synthetic construct
  misc_feature 1..20: note = chemically synthesized
  source 1..20: mol_type = other DNA
ctaattcttaaatcctctag

SEQ ID NO: 64492 - DNA, 20 bp, synthetic construct
  misc_feature 1..20: note = chemically synthesized
  source 1..20: mol_type = other DNA
gaattaactaatactataaa

SEQ ID NO: 64493 - DNA, 20 bp, synthetic construct
  misc_feature 1..20: note = chemically synthesized
  source 1..20: mol_type = other DNA
actaatactataaaatgggt

SEQ ID NO: 64494 - DNA, 20 bp, synthetic construct
  misc_feature 1..20: note = chemically synthesized
  source 1..20: mol_type = other DNA
ttttataacaactggtaaga

SEQ ID NO: 64495 - DNA, 20 bp, synthetic construct
  misc_feature 1..20: note = chemically synthesized
  source 1..20: mol_type = other DNA
acaattacgtctgtgttata

SEQ ID NO: 64496 - DNA, 20 bp, synthetic construct
  misc_feature 1..20: note = chemically synthesized
  source 1..20: mol_type = other DNA
gacacttacgttcctgataa

SEQ ID NO: 64497 - DNA, 20 bp, synthetic construct
  misc_feature 1..20: note = chemically synthesized
  source 1..20: mol_type = other DNA
tccagatttctaataccaca

SEQ ID NO: 64498 - DNA, 20 bp, synthetic construct
  misc_feature 1..20: note = chemically synthesized
  source 1..20: mol_type = other DNA
tctctacacccagggcaccg

SEQ ID NO: 64499 - DNA, 20 bp, synthetic construct
  misc_feature 1..20: note = chemically synthesized
  source 1..20: mol_type = other DNA
ctttgaccatcagaggacac

SEQ ID NO: 64500 - DNA, 20 bp, synthetic construct
  misc_feature 1..20: note = chemically synthesized
  source 1..20: mol_type = other DNA
cacttggattcaccggtgcc

SEQ ID NO: 64501 - DNA, 20 bp, synthetic construct
  misc_feature 1..20: note = chemically synthesized
  source 1..20: mol_type = other DNA
gagaagttaacaaaattgat

SEQ ID NO: 64502 - DNA, 20 bp, synthetic construct
  misc_feature 1..20: note = chemically synthesized
  source 1..20: mol_type = other DNA
aacaaaattgatcagagtga

SEQ ID NO: 64503 - DNA, 20 bp, synthetic construct
  misc_feature 1..20: note = chemically synthesized
  source 1..20: mol_type = other DNA
ttagaaatctggagcgaaac

SEQ ID NO: 64504 - DNA, 20 bp, synthetic construct
  misc_feature 1..20: note = chemically synthesized
  source 1..20: mol_type = other DNA
gacgtaattgtttccaaagc

SEQ ID NO: 64505 - DNA, 20 bp, synthetic construct
  misc_feature 1..20: note = chemically synthesized
  source 1..20: mol_type = other DNA
cagacacactgctatcaacc

SEQ ID NO: 64506 - DNA, 20 bp, synthetic construct
  misc_feature 1..20: note = chemically synthesized
  source 1..20: mol_type = other DNA
atcaaccagggatgtgtata

SEQ ID NO: 64507 - DNA, 20 bp, synthetic construct
  misc_feature 1..20: note = chemically synthesized
  source 1..20: mol_type = other DNA
gctttgttaaaagtctccat

SEQ ID NO: 64508 - DNA, 20 bp, synthetic construct
  misc_feature 1..20: note = chemically synthesized
  source 1..20: mol_type = other DNA
gttaaaagtctccatttgag

SEQ ID NO: 64509 - DNA, 20 bp, synthetic construct
  misc_feature 1..20: note = chemically synthesized
  source 1..20: mol_type = other DNA
agtattagttaattcttcta

SEQ ID NO: 64510 - DNA, 20 bp, synthetic construct
  misc_feature 1..20: note = chemically synthesized
  source 1..20: mol_type = other DNA
ttaattcttctagaggattt

SEQ ID NO: 64511 - DNA, 20 bp, synthetic construct
  misc_feature 1..20: note = chemically synthesized
  source 1..20: mol_type = other DNA
ttaagaattagatatctgac

SEQ ID NO: 64512 - DNA, 20 bp, synthetic construct
  misc_feature 1..20: note = chemically synthesized
  source 1..20: mol_type = other DNA
gattaatcaataaatacgtt

SEQ ID NO: 64513 - DNA, 20 bp, synthetic construct
  misc_feature 1..20: note = chemically synthesized
  source 1..20: mol_type = other DNA
gttttgaataactatagggc

SEQ ID NO: 64514 - DNA, 20 bp, synthetic construct
  misc_feature 1..20: note = chemically synthesized
  source 1..20: mol_type = other DNA
cccccaaatacattttatgg

SEQ ID NO: 64515 - DNA, 20 bp, synthetic construct
  misc_feature 1..20: note = chemically synthesized
  source 1..20: mol_type = other DNA
aatgcaccaaagcaatgagg

SEQ ID NO: 64516 - DNA, 20 bp, synthetic construct
  misc_feature 1..20: note = chemically synthesized
  source 1..20: mol_type = other DNA
aagcaatgaggtagaatgct

SEQ ID NO: 64517 - DNA, 20 bp, synthetic construct
  misc_feature 1..20: note = chemically synthesized
  source 1..20: mol_type = other DNA
aacttcattctttttgaagt

SEQ ID NO: 64518 - DNA, 20 bp, synthetic construct
  misc_feature 1..20: note = chemically synthesized
  source 1..20: mol_type = other DNA
aattatattaaaaatagatg

SEQ ID NO: 64519 - DNA, 20 bp, synthetic construct
  misc_feature 1..20: note = chemically synthesized
  source 1..20: mol_type = other DNA
agctggttggcaaagctgga

SEQ ID NO: 64520 - DNA, 20 bp, synthetic construct
  misc_feature 1..20: note = chemically synthesized
  source 1..20: mol_type = other DNA
tcacttctacttcatttagc

SEQ ID NO: 64521 - DNA, 20 bp, synthetic construct
  misc_feature 1..20: note = chemically synthesized
  source 1..20: mol_type = other DNA
ttagcgtgaatcttaaatgt

SEQ ID NO: 64522 - DNA, 20 bp, synthetic construct
  misc_feature 1..20: note = chemically synthesized
  source 1..20: mol_type = other DNA
gtgaatcttaaatgtaggaa

SEQ ID NO: 64523 - DNA, 20 bp, synthetic construct
  misc_feature 1..20: note = chemically synthesized
  source 1..20: mol_type = other DNA
cgatgagaagccatcctgcc

SEQ ID NO: 64524 - DNA, 20 bp, synthetic construct
  misc_feature 1..20: note = chemically synthesized
  source 1..20: mol_type = other DNA
gagaagccatcctgccaaga

SEQ ID NO: 64525 - DNA, 20 bp, synthetic construct
  misc_feature 1..20: note = chemically synthesized
  source 1..20: mol_type = other DNA
ataattaattcaaacttcaa

SEQ ID NO: 64526 - DNA, 20 bp, synthetic construct
  misc_feature 1..20: note = chemically synthesized
  source 1..20: mol_type = other DNA
tctgtttcctcagatagatg

SEQ ID NO: 64527 - DNA, 20 bp, synthetic construct
  misc_feature 1..20: note = chemically synthesized
  source 1..20: mol_type = other DNA
aagctgttaatactgaattt

SEQ ID NO: 64528 - DNA, 20 bp, synthetic construct
  misc_feature 1..20: note = chemically synthesized
  source 1..20: mol_type = other DNA
tctaattcttaaatcctcta

SEQ ID NO: 64529 - DNA, 20 bp, synthetic construct
  misc_feature 1..20: note = chemically synthesized
  source 1..20: mol_type = other DNA
tgatagcagtgtgtctggag

SEQ ID NO: 64530 - DNA, 20 bp, synthetic construct
  misc_feature 1..20: note = chemically synthesized
  source 1..20: mol_type = other DNA
ctccagatttctaataccac

SEQ ID NO: 64531 - DNA, 20 bp, synthetic construct
  misc_feature 1..20: note = chemically synthesized
  source 1..20: mol_type = other DNA
caatgtggccgtgcatgtgt

SEQ ID NO: 64532 - DNA, 20 bp, synthetic construct
  misc_feature 1..20: note = chemically synthesized
  source 1..20: mol_type = other DNA
aggatttattctttgtggta

SEQ ID NO: 64533 - DNA, 20 bp, synthetic construct
  misc_feature 1..20: note = chemically synthesized
  source 1..20: mol_type = other DNA
attagaaatctggagcgaaa

SEQ ID NO: 64534 - DNA, 20 bp, synthetic construct
  misc_feature 1..20: note = chemically synthesized
  source 1..20: mol_type = other DNA
agacgtaattgtttccaaag

SEQ ID NO: 64535 - DNA, 20 bp, synthetic construct
  misc_feature 1..20: note = chemically synthesized
  source 1..20: mol_type = other DNA
tgtgtataatgaattttaag

SEQ ID NO: 64536 - DNA, 20 bp, synthetic construct
  misc_feature 1..20: note = chemically synthesized
  source 1..20: mol_type = other DNA
gttaattcttctagaggatt

SEQ ID NO: 64537 - DNA, 20 bp, synthetic construct
  misc_feature 1..20: note = chemically synthesized
  source 1..20: mol_type = other DNA
tttaagaattagatatctga

SEQ ID NO: 64538 - DNA, 20 bp, synthetic construct
  misc_feature 1..20: note = chemically synthesized
  source 1..20: mol_type = other DNA
cgttttgaataactataggg

SEQ ID NO: 64539 - DNA, 20 bp, synthetic construct
  misc_feature 1..20: note = chemically synthesized
  source 1..20: mol_type = other DNA
taatgcaccaaagcaatgag

SEQ ID NO: 64540 - DNA, 20 bp, synthetic construct
  misc_feature 1..20: note = chemically synthesized
  source 1..20: mol_type = other DNA
aaatgtaggaatgggatgtc

SEQ ID NO: 64541 - DNA, 20 bp, synthetic construct
  misc_feature 1..20: note = chemically synthesized
  source 1..20: mol_type = other DNA
acgatgagaagccatcctgc

SEQ ID NO: 64542 - DNA, 20 bp, synthetic construct
  misc_feature 1..20: note = chemically synthesized
  source 1..20: mol_type = other DNA
attctggccctatagttatt

SEQ ID NO: 64543 - DNA, 20 bp, synthetic construct
  misc_feature 1..20: note = chemically synthesized
  source 1..20: mol_type = other DNA
aacaactaaaatgatctcag

SEQ ID NO: 64544 - DNA, 20 bp, synthetic construct
  misc_feature 1..20: note = chemically synthesized
  source 1..20: mol_type = other DNA
taagtcaataatcagaatca

SEQ ID NO: 64545 - DNA, 20 bp, synthetic construct
  misc_feature 1..20: note = chemically synthesized
  source 1..20: mol_type = other DNA
tcagaatcagcaggtttgca

SEQ ID NO: 64546 - DNA, 20 bp, synthetic construct
  misc_feature 1..20: note = chemically synthesized
  source 1..20: mol_type = other DNA
agtccactcattcttggcag

SEQ ID NO: 64547 - DNA, 20 bp, synthetic construct
  misc_feature 1..20: note = chemically synthesized
  source 1..20: mol_type = other DNA
tctgaggctggccctacggt

SEQ ID NO: 64548 - DNA, 20 bp, synthetic construct
  misc_feature 1..20: note = chemically synthesized
  source 1..20: mol_type = other DNA
gtgacatcccattcctacat

SEQ ID NO: 64549 - DNA, 20 bp, synthetic construct
  misc_feature 1..20: note = chemically synthesized
  source 1..20: mol_type = other DNA
atgaagtagaagtgactcct

SEQ ID NO: 64550 - DNA, 20 bp, synthetic construct
  misc_feature 1..20: note = chemically synthesized
  source 1..20: mol_type = other DNA
gactccttccagctttgcca

SEQ ID NO: 64551 - DNA, 20 bp, synthetic construct
  misc_feature 1..20: note = chemically synthesized
  source 1..20: mol_type = other DNA
tcaaaaagaatgaagttcca

SEQ ID NO: 64552 - DNA, 20 bp, synthetic construct
  misc_feature 1..20: note = chemically synthesized
  source 1..20: mol_type = other DNA
gaactctgagcattctacct

SEQ ID NO: 64553 - DNA, 20 bp, synthetic construct
  misc_feature 1..20: note = chemically synthesized
  source 1..20: mol_type = other DNA
tacctcattgctttggtgca

SEQ ID NO: 64554 - DNA, 20 bp, synthetic construct
  misc_feature 1..20: note = chemically synthesized
  source 1..20: mol_type = other DNA
aggtttgtaatatctggtac

SEQ ID NO: 64555 - DNA, 20 bp, synthetic construct
  misc_feature 1..20: note = chemically synthesized
  source 1..20: mol_type = other DNA
gtatttgggggacaaactgc

SEQ ID NO: 64556 - DNA, 20 bp, synthetic construct
  misc_feature 1..20: note = chemically synthesized
  source 1..20: mol_type = other DNA
atagttattcaaaacgtatt

SEQ ID NO: 64557 - DNA, 20 bp, synthetic construct
  misc_feature 1..20: note = chemically synthesized
  source 1..20: mol_type = other DNA
tatttattgattaatcttta

SEQ ID NO: 64558 - DNA, 20 bp, synthetic construct
  misc_feature 1..20: note = chemically synthesized
  source 1..20: mol_type = other DNA
actaaaatgatctcaggaaa

SEQ ID NO: 64559 - DNA, 20 bp, synthetic construct
  misc_feature 1..20: note = chemically synthesized
  source 1..20: mol_type = other DNA
tgtctggaggcagaaaccat

SEQ ID NO: 64560 - DNA, 20 bp, synthetic construct
  misc_feature 1..20: note = chemically synthesized
  source 1..20: mol_type = other DNA
taatgggatcagtgtgtaat

SEQ ID NO: 64561 - DNA, 20 bp, synthetic construct
  misc_feature 1..20: note = chemically synthesized
  source 1..20: mol_type = other DNA
gtgtgtaattcttgtttcgc

SEQ ID NO: 64562 - DNA, 20 bp, synthetic construct
  misc_feature 1..20: note = chemically synthesized
  source 1..20: mol_type = other DNA
actttgaccatcagaggaca

SEQ ID NO: 64563 - DNA, 20 bp, synthetic construct
  misc_feature 1..20: note = chemically synthesized
  source 1..20: mol_type = other DNA
taacaaaattgatcagagtg

SEQ ID NO: 64564 - DNA, 20 bp, synthetic construct
  misc_feature 1..20: note = chemically synthesized
  source 1..20: mol_type = other DNA
aacgtaagtgtcgacaatta

SEQ ID NO: 64565 - DNA, 20 bp, synthetic construct
  misc_feature 1..20: note = chemically synthesized
  source 1..20: mol_type = other DNA
actcagtataacacagacgt

SEQ ID NO: 64566 - DNA, 20 bp, synthetic construct
  misc_feature 1..20: note = chemically synthesized
  source 1..20: mol_type = other DNA
gtaattgtttccaaagcaag

SEQ ID NO: 64567 - DNA, 20 bp, synthetic construct
  misc_feature 1..20: note = chemically synthesized
  source 1..20: mol_type = other DNA
aaaataggtcccctgagaac

SEQ ID NO: 64568 - DNA, 20 bp, synthetic construct
  misc_feature 1..20: note = chemically synthesized
  source 1..20: mol_type = other DNA
tgtaccatacatagggccaa

SEQ ID NO: 64569 - DNA, 20 bp, synthetic construct
  misc_feature 1..20: note = chemically synthesized
  source 1..20: mol_type = other DNA
tagtattagttaattcttct

SEQ ID NO: 64570 - DNA, 20 bp, synthetic construct
  misc_feature 1..20: note = chemically synthesized
  source 1..20: mol_type = other DNA
atattgttcactaagccttt

SEQ ID NO: 64571 - DNA, 20 bp, synthetic construct
  misc_feature 1..20: note = chemically synthesized
  source 1..20: mol_type = other DNA
ttttaaagattaatcaataa

SEQ ID NO: 64572 - DNA, 20 bp, synthetic construct
  misc_feature 1..20: note = chemically synthesized
  source 1..20: mol_type = other DNA
agggccagaatataatctcc

SEQ ID NO: 64573 - DNA, 20 bp, synthetic construct
  misc_feature 1..20: note = chemically synthesized
  source 1..20: mol_type = other DNA
ttttctgaaaattcagtatt

SEQ ID NO: 64574 - DNA, 20 bp, synthetic construct
  misc_feature 1..20: note = chemically synthesized
  source 1..20: mol_type = other DNA
cagtggaacttcattctttt

SEQ ID NO: 64575 - DNA, 20 bp, synthetic construct
  misc_feature 1..20: note = chemically synthesized
  source 1..20: mol_type = other DNA
tgtgatggctgctcccagcc

SEQ ID NO: 64576 - DNA, 20 bp, synthetic construct
  misc_feature 1..20: note = chemically synthesized
  source 1..20: mol_type = other DNA
tactcacttctcctgagcta

SEQ ID NO: 64577 - DNA, 20 bp, synthetic construct
  misc_feature 1..20: note = chemically synthesized
  source 1..20: mol_type = other DNA
tgccaatctgactgcaaacc

SEQ ID NO: 64578 - DNA, 20 bp, synthetic construct
  misc_feature 1..20: note = chemically synthesized
  source 1..20: mol_type = other DNA
tctgactgcaaacctgctga

SEQ ID NO: 64579 - DNA, 22 bp, synthetic construct
  misc_feature 1..22: note = chemically synthesized
  source 1..22: mol_type = other DNA
actaagtcaataatcagaatca

SEQ ID NO: 64580 - DNA, 22 bp, synthetic construct
  misc_feature 1..22: note = chemically synthesized
  source 1..22: mol_type = other DNA
agtcaataatcagaatcagcag

SEQ ID NO: 64581 - DNA, 22 bp, synthetic construct
  misc_feature 1..22: note = chemically synthesized
  source 1..22: mol_type = other DNA
gcagtcagattggcagggataa

SEQ ID NO: 64582 - DNA, 22 bp, synthetic construct
  misc_feature 1..22: note = chemically synthesized
  source 1..22: mol_type = other DNA
cagtcagattggcagggataag

SEQ ID NO: 64583 - DNA, 22 bp, synthetic construct
  misc_feature 1..22: note = chemically synthesized
  source 1..22: mol_type = other DNA
gcagggataagcagcctagctc

SEQ ID NO: 64584 - DNA, 22 bp, synthetic construct
  misc_feature 1..22: note = chemically synthesized
  source 1..22: mol_type = other DNA
gctcaggagaagtgagtataaa

SEQ ID NO: 64585 - DNA, 22 bp, synthetic construct
  misc_feature 1..22: note = chemically synthesized
  source 1..22: mol_type = other DNA
aggagaagtgagtataaaagcc

SEQ ID NO: 64586 - DNA, 22 bp, synthetic construct
  misc_feature 1..22: note = chemically synthesized
  source 1..22: mol_type = other DNA
ggagcagccatcacagaagtcc

SEQ ID NO: 64587 - DNA, 22 bp, synthetic construct
  misc_feature 1..22: note = chemically synthesized
  source 1..22: mol_type = other DNA
attcttggcaggatggcttctc

SEQ ID NO: 64588 - DNA, 22 bp, synthetic construct
  misc_feature 1..22: note = chemically synthesized
  source 1..22: mol_type = other DNA
ttggcaggatggcttctcatcg

SEQ ID NO: 64589 - DNA, 22 bp, synthetic construct
  misc_feature 1..22: note = chemically synthesized
  source 1..22: mol_type = other DNA
ggcaggatggcttctcatcgtc

SEQ ID NO: 64590 - DNA, 22 bp, synthetic construct
  misc_feature 1..22: note = chemically synthesized
  source 1..22: mol_type = other DNA
gcaggatggcttctcatcgtct

SEQ ID NO: 64591 - DNA, 22 bp, synthetic construct
  misc_feature 1..22: note = chemically synthesized
  source 1..22: mol_type = other DNA
ctcatcgtctgctcctcctctg

SEQ ID NO: 64592 - DNA, 22 bp, synthetic construct
  misc_feature 1..22: note = chemically synthesized
  source 1..22: mol_type = other DNA
tcatcgtctgctcctcctctgc

SEQ ID NO: 64593 - DNA, 22 bp, synthetic construct
  misc_feature 1..22: note = chemically synthesized
  source 1..22: mol_type = other DNA
atcgtctgctcctcctctgcct

SEQ ID NO: 64594 - DNA, 22 bp, synthetic construct
  misc_feature 1..22: note = chemically synthesized
  source 1..22: mol_type = other DNA
ctcctcctctgccttgctggac

SEQ ID NO: 64595 - DNA, 22 bp, synthetic construct
  misc_feature 1..22: note = chemically synthesized
  source 1..22: mol_type = other DNA
ctcctctgccttgctggactgg

SEQ ID NO: 64596 - DNA, 22 bp, synthetic construct
  misc_feature 1..22: note = chemically synthesized
  source 1..22: mol_type = other DNA
ctctgccttgctggactggtat

SEQ ID NO: 64597 - DNA, 22 bp, synthetic construct
  misc_feature 1..22: note = chemically synthesized
  source 1..22: mol_type = other DNA
tgccttgctggactggtatttg

SEQ ID NO: 64598 - DNA, 22 bp, synthetic construct
  misc_feature 1..22: note = chemically synthesized
  source 1..22: mol_type = other DNA
ccttgctggactggtatttgtg

SEQ ID NO: 64599 - DNA, 22 bp, synthetic construct
  misc_feature 1..22: note = chemically synthesized
  source 1..22: mol_type = other DNA
gctggactggtatttgtgtctg

SEQ ID NO: 64600 - DNA, 22 bp, synthetic construct
  misc_feature 1..22: note = chemically synthesized
  source 1..22: mol_type = other DNA
ctggactggtatttgtgtctga

SEQ ID NO: 64601 - DNA, 22 bp, synthetic construct
  misc_feature 1..22: note = chemically synthesized
  source 1..22: mol_type = other DNA
gactggtatttgtgtctgaggc

SEQ ID NO: 64602 - DNA, 22 bp, synthetic construct
  misc_feature 1..22: note = chemically synthesized
  source 1..22: mol_type = other DNA
gtatttgtgtctgaggctggcc

SEQ ID NO: 64603 - DNA, 22 bp, synthetic construct
  misc_feature 1..22: note = chemically synthesized
  source 1..22: mol_type = other DNA
gtgtctgaggctggccctacgg

SEQ ID NO: 64604 - DNA, 22 bp, synthetic construct
  misc_feature 1..22: note = chemically synthesized
  source 1..22: mol_type = other DNA
tgtctgaggctggccctacggt

SEQ ID NO: 64605 - DNA, 22 bp, synthetic construct
  misc_feature 1..22: note = chemically synthesized
  source 1..22: mol_type = other DNA
aggctggccctacggtgagtgt

SEQ ID NO: 64606 - DNA, 22 bp, synthetic construct
  misc_feature 1..22: note = chemically synthesized
  source 1..22: mol_type = other DNA
gccctacggtgagtgtttctgt

SEQ ID NO: 64607 - DNA, 22 bp, synthetic construct
  misc_feature 1..22: note = chemically synthesized
  source 1..22: mol_type = other DNA
cggtgagtgtttctgtgacatc

SEQ ID NO: 64608 - DNA, 22 bp, synthetic construct
  misc_feature 1..22: note = chemically synthesized
  source 1..22: mol_type = other DNA
ctgtgacatcccattcctacat

SEQ ID NO: 64609 - DNA, 22 bp, synthetic construct
  misc_feature 1..22: note = chemically synthesized
  source 1..22: mol_type = other DNA
tgtgacatcccattcctacatt

SEQ ID NO: 64610 - DNA, 22 bp, synthetic construct
  misc_feature 1..22: note = chemically synthesized
  source 1..22: mol_type = other DNA
tgacatcccattcctacattta

SEQ ID NO: 64611 - DNA, 22 bp, synthetic construct
  misc_feature 1..22: note = chemically synthesized
  source 1..22: mol_type = other DNA
ctacatttaagattcacgctaa

SEQ ID NO: 64612 - DNA, 22 bp, synthetic construct
  misc_feature 1..22: note = chemically synthesized
  source 1..22: mol_type = other DNA
catttaagattcacgctaaatg

SEQ ID NO: 64613 - DNA, 22 bp, synthetic construct
  misc_feature 1..22: note = chemically synthesized
  source 1..22: mol_type = other DNA
aagattcacgctaaatgaagta

SEQ ID NO: 64614 - DNA, 22 bp, synthetic construct
  misc_feature 1..22: note = chemically synthesized
  source 1..22: mol_type = other DNA
agattcacgctaaatgaagtag

SEQ ID NO: 64615 - DNA, 22 bp, synthetic construct
  misc_feature 1..22: note = chemically synthesized
  source 1..22: mol_type = other DNA
acgctaaatgaagtagaagtga

SEQ ID NO: 64616 - DNA, 22 bp, synthetic construct
  misc_feature 1..22: note = chemically synthesized
  source 1..22: mol_type = other DNA
aatgaagtagaagtgactcctt

SEQ ID NO: 64617 - DNA, 22 bp, synthetic construct
  misc_feature 1..22: note = chemically synthesized
  source 1..22: mol_type = other DNA
cttccagctttgccaaccagct

SEQ ID NO: 64618 - DNA, 22 bp, synthetic construct
  misc_feature 1..22: note = chemically synthesized
  source 1..22: mol_type = other DNA
ccagctttgccaaccagctttt

SEQ ID NO: 64619 - DNA, 22 bp, synthetic construct
  misc_feature 1..22: note = chemically synthesized
  source 1..22: mol_type = other DNA
cagctttgccaaccagctttta

SEQ ID NO: 64620 - DNA, 22 bp, synthetic construct
  misc_feature 1..22: note = chemically synthesized
  source 1..22: mol_type = other DNA
tgccaaccagcttttattacta

SEQ ID NO: 64621 - DNA, 22 bp, synthetic construct
  misc_feature 1..22: note = chemically synthesized
  source 1..22: mol_type = other DNA
gccaaccagcttttattactag

SEQ ID NO: 64622 - DNA, 22 bp, synthetic construct
  misc_feature 1..22: note = chemically synthesized
  source 1..22: mol_type = other DNA
ccaaccagcttttattactagg

SEQ ID NO: 64623 - DNA, 22 bp, synthetic construct
  misc_feature 1..22: note = chemically synthesized
  source 1..22: mol_type = other DNA
ttattactagggcaagggtacc

SEQ ID NO: 64624 - DNA, 22 bp, synthetic construct
  misc_feature 1..22: note = chemically synthesized
  source 1..22: mol_type = other DNA
tattactagggcaagggtaccc

SEQ ID NO: 64625 - DNA, 22 bp, synthetic construct
  misc_feature 1..22: note = chemically synthesized
  source 1..22: mol_type = other DNA
attactagggcaagggtaccca

SEQ ID NO: 64626 - DNA, 22 bp, synthetic construct
  misc_feature 1..22: note = chemically synthesized
  source 1..22: mol_type = other DNA
ttactagggcaagggtacccag

SEQ ID NO: 64627 - DNA, 22 bp, synthetic construct
  misc_feature 1..22: note = chemically synthesized
  source 1..22: mol_type = other DNA
ctagggcaagggtacccagcat

SEQ ID NO: 64628 - DNA, 22 bp, synthetic construct
  misc_feature 1..22: note = chemically synthesized
  source 1..22: mol_type = other DNA
gggcaagggtacccagcatcta

SEQ ID NO: 64629 - DNA, 22 bp, synthetic construct
  misc_feature 1..22: note = chemically synthesized
  source 1..22: mol_type = other DNA
tttttaatataattaattcaaa

SEQ ID NO: 64630 - DNA, 22 bp, synthetic construct
  misc_feature 1..22: note = chemically synthesized
  source 1..22: mol_type = other DNA
ttaatataattaattcaaactt

SEQ ID NO: 64631 - DNA, 22 bp, synthetic construct
  misc_feature 1..22: note = chemically synthesized
  source 1..22: mol_type = other DNA
taatataattaattcaaacttc

SEQ ID NO: 64632 - DNA, 22 bp, synthetic construct
  misc_feature 1..22: note = chemically synthesized
  source 1..22: mol_type = other DNA
aatataattaattcaaacttca

SEQ ID NO: 64633 - DNA, 22 bp, synthetic construct
  misc_feature 1..22: note = chemically synthesized
  source 1..22: mol_type = other DNA
atataattaattcaaacttcaa

SEQ ID NO: 64634 - DNA, 22 bp, synthetic construct
  misc_feature 1..22: note = chemically synthesized
  source 1..22: mol_type = other DNA
attcaaacttcaaaaagaatga

SEQ ID NO: 64635 - DNA, 22 bp, synthetic construct
  misc_feature 1..22: note = chemically synthesized
  source 1..22: mol_type = other DNA
aaacttcaaaaagaatgaagtt

SEQ ID NO: 64636 - DNA, 22 bp, synthetic construct
  misc_feature 1..22: note = chemically synthesized
  source 1..22: mol_type = other DNA
caaaaagaatgaagttccactg

SEQ ID NO: 64637 - DNA, 22 bp, synthetic construct
  misc_feature 1..22: note = chemically synthesized
  source 1..22: mol_type = other DNA
aaaaagaatgaagttccactga

SEQ ID NO: 64638 - DNA, 22 bp, synthetic construct
  misc_feature 1..22: note = chemically synthesized
  source 1..22: mol_type = other DNA
cactgagcttactgagctggga

SEQ ID NO: 64639 - DNA, 22 bp, synthetic construct
  misc_feature 1..22: note = chemically synthesized
  source 1..22: mol_type = other DNA
agcttactgagctgggacttga

SEQ ID NO: 64640 - DNA, 22 bp, synthetic construct
  misc_feature 1..22: note = chemically synthesized
  source 1..22: mol_type = other DNA
actgagctgggacttgaactct

SEQ ID NO: 64641 - DNA, 22 bp, synthetic construct
  misc_feature 1..22: note = chemically synthesized
  source 1..22: mol_type = other DNA
ctgagctgggacttgaactctg

SEQ ID NO: 64642 - DNA, 22 bp, synthetic construct
  misc_feature 1..22: note = chemically synthesized
  source 1..22: mol_type = other DNA
agctgggacttgaactctgagc

SEQ ID NO: 64643 - DNA, 22 bp, synthetic construct
  misc_feature 1..22: note = chemically synthesized
  source 1..22: mol_type = other DNA
ggacttgaactctgagcattct

SEQ ID NO: 64644 - DNA, 22 bp, synthetic construct
  misc_feature 1..22: note = chemically synthesized
  source 1..22: mol_type = other DNA
gaactctgagcattctacctca

SEQ ID NO: 64645 - DNA, 22 bp, synthetic construct
  misc_feature 1..22: note = chemically synthesized
  source 1..22: mol_type = other DNA
aactctgagcattctacctcat

SEQ ID NO: 64646 - DNA, 22 bp, synthetic construct
  misc_feature 1..22: note = chemically synthesized
  source 1..22: mol_type = other DNA
tgagcattctacctcattgctt

SEQ ID NO: 64647 - DNA, 22 bp, synthetic construct
  misc_feature 1..22: note = chemically synthesized
  source 1..22: mol_type = other DNA
agcattctacctcattgctttg

SEQ ID NO: 64648 - DNA, 22 bp, synthetic construct
  misc_feature 1..22: note = chemically synthesized
  source 1..22: mol_type = other DNA
tacctcattgctttggtgcatt

SEQ ID NO: 64649 - DNA, 22 bp, synthetic construct
  misc_feature 1..22: note = chemically synthesized
  source 1..22: mol_type = other DNA
cctcattgctttggtgcattag

SEQ ID NO: 64650 - DNA, 22 bp, synthetic construct
  misc_feature 1..22: note = chemically synthesized
  source 1..22: mol_type = other DNA
attgctttggtgcattaggttt

SEQ ID NO: 64651 - DNA, 22 bp, synthetic construct
  misc_feature 1..22: note = chemically synthesized
  source 1..22: mol_type = other DNA
ctttggtgcattaggtttgtaa

SEQ ID NO: 64652 - DNA, 22 bp, synthetic construct
  misc_feature 1..22: note = chemically synthesized
  source 1..22: mol_type = other DNA
tggtgcattaggtttgtaatat

SEQ ID NO: 64653 - DNA, 22 bp, synthetic construct
  misc_feature 1..22: note = chemically synthesized
  source 1..22: mol_type = other DNA
ggtgcattaggtttgtaatatc

SEQ ID NO: 64654 - DNA, 22 bp, synthetic construct
  misc_feature 1..22: note = chemically synthesized
  source 1..22: mol_type = other DNA
gtgcattaggtttgtaatatct

SEQ ID NO: 64655 - DNA, 22 bp, synthetic construct
  misc_feature 1..22: note = chemically synthesized
  source 1..22: mol_type = other DNA
ggtttgtaatatctggtacctc

SEQ ID NO: 64656 - DNA, 22 bp, synthetic construct
  misc_feature 1..22: note = chemically synthesized
  source 1..22: mol_type = other DNA
gtaatatctggtacctctgttt

SEQ ID NO: 64657 - DNA, 22 bp, synthetic construct
  misc_feature 1..22: note = chemically synthesized
  source 1..22: mol_type = other DNA
taatatctggtacctctgtttc

SEQ ID NO: 64658 - DNA, 22 bp, synthetic construct
  misc_feature 1..22: note = chemically synthesized
  source 1..22: mol_type = other DNA
gtacctctgtttcctcagatag

SEQ ID NO: 64659 - DNA, 22 bp, synthetic construct
  misc_feature 1..22: note = chemically synthesized
  source 1..22: mol_type = other DNA
tgtttcctcagatagatgatag

SEQ ID NO: 64660 - DNA, 22 bp, synthetic construct
  misc_feature 1..22: note = chemically synthesized
  source 1..22: mol_type = other DNA
tttcctcagatagatgatagaa

SEQ ID NO: 64661 - DNA, 22 bp, synthetic construct
  misc_feature 1..22: note = chemically synthesized
  source 1..22: mol_type = other DNA
cctcagatagatgatagaaata

SEQ ID NO: 64662 - DNA, 22 bp, synthetic construct
  misc_feature 1..22: note = chemically synthesized
  source 1..22: mol_type = other DNA
ctcagatagatgatagaaataa

SEQ ID NO: 64663 - DNA, 22 bp, synthetic construct
  misc_feature 1..22: note = chemically synthesized
  source 1..22: mol_type = other DNA
agatagatgatagaaataaaga

SEQ ID NO: 64664 - DNA, 22 bp, synthetic construct
  misc_feature 1..22: note = chemically synthesized
  source 1..22: mol_type = other DNA
aggaagctgttaatactgaatt

SEQ ID NO: 64665 - DNA, 22 bp, synthetic construct
  misc_feature 1..22: note = chemically synthesized
  source 1..22: mol_type = other DNA
ttaatactgaattttcagaaaa

SEQ ID NO: 64666 - DNA, 22 bp, synthetic construct
  misc_feature 1..22: note = chemically synthesized
  source 1..22: mol_type = other DNA
atactgaattttcagaaaagta

SEQ ID NO: 64667 - DNA, 22 bp, synthetic construct
  misc_feature 1..22: note = chemically synthesized
  source 1..22: mol_type = other DNA
aattttcagaaaagtatccctc

SEQ ID NO: 64668 - DNA, 22 bp, synthetic construct
  misc_feature 1..22: note = chemically synthesized
  source 1..22: mol_type = other DNA
tcagaaaagtatccctccataa

SEQ ID NO: 64669 - DNA, 22 bp, synthetic construct
  misc_feature 1..22: note = chemically synthesized
  source 1..22: mol_type = other DNA
cagaaaagtatccctccataaa

SEQ ID NO: 64670 - DNA, 22 bp, synthetic construct
  misc_feature 1..22: note = chemically synthesized
  source 1..22: mol_type = other DNA
agaaaagtatccctccataaaa

SEQ ID NO: 64671 - DNA, 22 bp, synthetic construct
  misc_feature 1..22: note = chemically synthesized
  source 1..22: mol_type = other DNA
cataaaatgtatttgggggaca

SEQ ID NO: 64672 - DNA, 22 bp, synthetic construct
  misc_feature 1..22: note = chemically synthesized
  source 1..22: mol_type = other DNA
gggggacaaactgcaggagatt

SEQ ID NO: 64673 - DNA, 22 bp, synthetic construct
  misc_feature 1..22: note = chemically synthesized
  source 1..22: mol_type = other DNA
ggggacaaactgcaggagatta

SEQ ID NO: 64674 - DNA, 22 bp, synthetic construct
  misc_feature 1..22: note = chemically synthesized
  source 1..22: mol_type = other DNA
caggagattatattctggccct

SEQ ID NO: 64675 - DNA, 22 bp, synthetic construct
  misc_feature 1..22: note = chemically synthesized
  source 1..22: mol_type = other DNA
tattctggccctatagttattc

SEQ ID NO: 64676 - DNA, 22 bp, synthetic construct
  misc_feature 1..22: note = chemically synthesized
  source 1..22: mol_type = other DNA
tggccctatagttattcaaaac

SEQ ID NO: 64677 - DNA, 22 bp, synthetic construct
  misc_feature 1..22: note = chemically synthesized
  source 1..22: mol_type = other DNA
gccctatagttattcaaaacgt

SEQ ID NO: 64678 - DNA, 22 bp, synthetic construct
  misc_feature 1..22: note = chemically synthesized
  source 1..22: mol_type = other DNA
tagttattcaaaacgtatttat

SEQ ID NO: 64679 - DNA, 22 bp, synthetic construct
  misc_feature 1..22: note = chemically synthesized
  source 1..22: mol_type = other DNA
ttcaaaacgtatttattgatta

SEQ ID NO: 64680 - DNA, 22 bp, synthetic construct
  misc_feature 1..22: note = chemically synthesized
  source 1..22: mol_type = other DNA
aaaacgtatttattgattaatc

SEQ ID NO: 64681 - DNA, 22 bp, synthetic construct
  misc_feature 1..22: note = chemically synthesized
  source 1..22: mol_type = other DNA
attgattaatctttaaaaggct

SEQ ID NO: 64682 - DNA, 22 bp, synthetic construct
  misc_feature 1..22: note = chemically synthesized
  source 1..22: mol_type = other DNA
ttgattaatctttaaaaggctt

SEQ ID NO: 64683 - DNA, 22 bp, synthetic construct
  misc_feature 1..22: note = chemically synthesized
  source 1..22: mol_type = other DNA
attaatctttaaaaggcttagt

SEQ ID NO: 64684 - DNA, 22 bp, synthetic construct
  misc_feature 1..22: note = chemically synthesized
  source 1..22: mol_type = other DNA
atctttaaaaggcttagtgaac

SEQ ID NO: 64685 - DNA, 22 bp, synthetic construct
  misc_feature 1..22: note = chemically synthesized
  source 1..22: mol_type = other DNA
taaaaggcttagtgaacaatat

SEQ ID NO: 64686 - DNA, 22 bp, synthetic construct
  misc_feature 1..22: note = chemically synthesized
  source 1..22: mol_type = other DNA
aaaaggcttagtgaacaatatt

SEQ ID NO: 64687 - DNA, 22 bp, synthetic construct
  misc_feature 1..22: note = chemically synthesized
  source 1..22: mol_type = other DNA
aaaggcttagtgaacaatattc

SEQ ID NO: 64688 - DNA, 22 bp, synthetic construct
  misc_feature 1..22: note = chemically synthesized
  source 1..22: mol_type = other DNA
agtgaacaatattctagtcaga

SEQ ID NO: 64689 - DNA, 22 bp, synthetic construct
  misc_feature 1..22: note = chemically synthesized
  source 1..22: mol_type = other DNA
gtgaacaatattctagtcagat

SEQ ID NO: 64690 - DNA, 22 bp, synthetic construct
  misc_feature 1..22: note = chemically synthesized
  source 1..22: mol_type = other DNA
tagtcagatatctaattcttaa

SEQ ID NO: 64691 - DNA, 22 bp, synthetic construct
  misc_feature 1..22: note = chemically synthesized
  source 1..22: mol_type = other DNA
gtcagatatctaattcttaaat

SEQ ID NO: 64692 - DNA, 22 bp, synthetic construct
  misc_feature 1..22: note = chemically synthesized
  source 1..22: mol_type = other DNA
attcttaaatcctctagaagaa

SEQ ID NO: 64693 - DNA, 22 bp, synthetic construct
  misc_feature 1..22: note = chemically synthesized
  source 1..22: mol_type = other DNA
ttaaatcctctagaagaattaa

SEQ ID NO: 64694 - DNA, 22 bp, synthetic construct
  misc_feature 1..22: note = chemically synthesized
  source 1..22: mol_type = other DNA
aaatcctctagaagaattaact

SEQ ID NO: 64695 - DNA, 22 bp, synthetic construct
  misc_feature 1..22: note = chemically synthesized
  source 1..22: mol_type = other DNA
aatcctctagaagaattaacta

SEQ ID NO: 64696 - DNA, 22 bp, synthetic construct
  misc_feature 1..22: note = chemically synthesized
  source 1..22: mol_type = other DNA
tagaagaattaactaatactat

SEQ ID NO: 64697 - DNA, 22 bp, synthetic construct
  misc_feature 1..22: note = chemically synthesized
  source 1..22: mol_type = other DNA
gaagaattaactaatactataa

SEQ ID NO: 64698 - DNA, 22 bp, synthetic construct
  misc_feature 1..22: note = chemically synthesized
  source 1..22: mol_type = other DNA
actaatactataaaatgggtct

SEQ ID NO: 64699 - DNA, 22 bp, synthetic construct
  misc_feature 1..22: note = chemically synthesized
  source 1..22: mol_type = other DNA
atactataaaatgggtctggat

SEQ ID NO: 64700 - DNA, 22 bp, synthetic construct
  misc_feature 1..22: note = chemically synthesized
  source 1..22: mol_type = other DNA
taaaatgggtctggatgtagtt

SEQ ID NO: 64701 - DNA, 22 bp, synthetic construct
  misc_feature 1..22: note = chemically synthesized
  source 1..22: mol_type = other DNA
gatgtagttctgacattatttt

SEQ ID NO: 64702 - DNA, 22 bp, synthetic construct
  misc_feature 1..22: note = chemically synthesized
  source 1..22: mol_type = other DNA
tgacattattttataacaactg

SEQ ID NO: 64703 - DNA, 22 bp, synthetic construct
  misc_feature 1..22: note = chemically synthesized
  source 1..22: mol_type = other DNA
acattattttataacaactggt

SEQ ID NO: 64704 - DNA, 22 bp, synthetic construct
  misc_feature 1..22: note = chemically synthesized
  source 1..22: mol_type = other DNA
ttttataacaactggtaagagg

SEQ ID NO: 64705 - DNA, 22 bp, synthetic construct
  misc_feature 1..22: note = chemically synthesized
  source 1..22: mol_type = other DNA
tataacaactggtaagagggag

SEQ ID NO: 64706 - DNA, 22 bp, synthetic construct
  misc_feature 1..22: note = chemically synthesized
  source 1..22: mol_type = other DNA
ataacaactggtaagagggagt

SEQ ID NO: 64707 - DNA, 22 bp, synthetic construct
  misc_feature 1..22: note = chemically synthesized
  source 1..22: mol_type = other DNA
taacaactggtaagagggagtg

SEQ ID NO: 64708 - DNA, 22 bp, synthetic construct
  misc_feature 1..22: note = chemically synthesized
  source 1..22: mol_type = other DNA
gtaagagggagtgactatagca

SEQ ID NO: 64709 - DNA, 22 bp, synthetic construct
  misc_feature 1..22: note = chemically synthesized
  source 1..22: mol_type = other DNA
tagcaacaactaaaatgatctc

SEQ ID NO: 64710 - DNA, 22 bp, synthetic construct
  misc_feature 1..22: note = chemically synthesized
  source 1..22: mol_type = other DNA
aaatgatctcaggaaaacctgt

SEQ ID NO: 64711 - DNA, 22 bp, synthetic construct
  misc_feature 1..22: note = chemically synthesized
  source 1..22: mol_type = other DNA
aggaaaacctgtttggccctat

SEQ ID NO: 64712 - DNA, 22 bp, synthetic construct
  misc_feature 1..22: note = chemically synthesized
  source 1..22: mol_type = other DNA
tttggccctatgtatggtacat

SEQ ID NO: 64713 - DNA, 22 bp, synthetic construct
  misc_feature 1..22: note = chemically synthesized
  source 1..22: mol_type = other DNA
ggccctatgtatggtacattac

SEQ ID NO: 64714 - DNA, 22 bp, synthetic construct
  misc_feature 1..22: note = chemically synthesized
  source 1..22: mol_type = other DNA
gccctatgtatggtacattaca

SEQ ID NO: 64715 - DNA, 22 bp, synthetic construct
  misc_feature 1..22: note = chemically synthesized
  source 1..22: mol_type = other DNA
tgtatggtacattacatctttt

SEQ ID NO: 64716 - DNA, 22 bp, synthetic construct
  misc_feature 1..22: note = chemically synthesized
  source 1..22: mol_type = other DNA
catcttttcagtaattccactc

SEQ ID NO: 64717 - DNA, 22 bp, synthetic construct
  misc_feature 1..22: note = chemically synthesized
  source 1..22: mol_type = other DNA
ttcagtaattccactcaaatgg

SEQ ID NO: 64718 - DNA, 22 bp, synthetic construct
  misc_feature 1..22: note = chemically synthesized
  source 1..22: mol_type = other DNA
tcagtaattccactcaaatgga

SEQ ID NO: 64719 - DNA, 22 bp, synthetic construct
  misc_feature 1..22: note = chemically synthesized
  source 1..22: mol_type = other DNA
cagtaattccactcaaatggag

SEQ ID NO: 64720 - DNA, 22 bp, synthetic construct
  misc_feature 1..22: note = chemically synthesized
  source 1..22: mol_type = other DNA
agtaattccactcaaatggaga

SEQ ID NO: 64721 - DNA, 22 bp, synthetic construct
  misc_feature 1..22: note = chemically synthesized
  source 1..22: mol_type = other DNA
cactcaaatggagacttttaac

SEQ ID NO: 64722 - DNA, 22 bp, synthetic construct
  misc_feature 1..22: note = chemically synthesized
  source 1..22: mol_type = other DNA
aaatggagacttttaacaaagc

SEQ ID NO: 64723 - DNA, 22 bp, synthetic construct
  misc_feature 1..22: note = chemically synthesized
  source 1..22: mol_type = other DNA
ttaacaaagcaactgttctcag

SEQ ID NO: 64724 - DNA, 22 bp, synthetic construct
  misc_feature 1..22: note = chemically synthesized
  source 1..22: mol_type = other DNA
taacaaagcaactgttctcagg

SEQ ID NO: 64725 - DNA, 22 bp, synthetic construct
  misc_feature 1..22: note = chemically synthesized
  source 1..22: mol_type = other DNA
aacaaagcaactgttctcaggg

SEQ ID NO: 64726 - DNA, 22 bp, synthetic construct
  misc_feature 1..22: note = chemically synthesized
  source 1..22: mol_type = other DNA
acaaagcaactgttctcagggg

SEQ ID NO: 64727 - DNA, 22 bp, synthetic construct
  misc_feature 1..22: note = chemically synthesized
  source 1..22: mol_type = other DNA
ttctcaggggacctattttctc

SEQ ID NO: 64728 - DNA, 22 bp, synthetic construct
  misc_feature 1..22: note = chemically synthesized
  source 1..22: mol_type = other DNA
tcaggggacctattttctccct

SEQ ID NO: 64729 - DNA, 22 bp, synthetic construct
  misc_feature 1..22: note = chemically synthesized
  source 1..22: mol_type = other DNA
aggggacctattttctccctta

SEQ ID NO: 64730 - DNA, 22 bp, synthetic construct
  misc_feature 1..22: note = chemically synthesized
  source 1..22: mol_type = other DNA
ttttctcccttaaaattcatta

SEQ ID NO: 64731 - DNA, 22 bp, synthetic construct
  misc_feature 1..22: note = chemically synthesized
  source 1..22: mol_type = other DNA
tctcccttaaaattcattatac

SEQ ID NO: 64732 - DNA, 22 bp, synthetic construct
  misc_feature 1..22: note = chemically synthesized
  source 1..22: mol_type = other DNA
ctcccttaaaattcattataca

SEQ ID NO: 64733 - DNA, 22 bp, synthetic construct
  misc_feature 1..22: note = chemically synthesized
  source 1..22: mol_type = other DNA
tcccttaaaattcattatacac

SEQ ID NO: 64734 - DNA, 22 bp, synthetic construct
  misc_feature 1..22: note = chemically synthesized
  source 1..22: mol_type = other DNA
ccttaaaattcattatacacat

SEQ ID NO: 64735 - DNA, 22 bp, synthetic construct
  misc_feature 1..22: note = chemically synthesized
  source 1..22: mol_type = other DNA
aaaattcattatacacatccct

SEQ ID NO: 64736 - DNA, 22 bp, synthetic construct
  misc_feature 1..22: note = chemically synthesized
  source 1..22: mol_type = other DNA
aaattcattatacacatccctg

SEQ ID NO: 64737 - DNA, 22 bp, synthetic construct
  misc_feature 1..22: note = chemically synthesized
  source 1..22: mol_type = other DNA
attatacacatccctggttgat

SEQ ID NO: 64738 - DNA, 22 bp, synthetic construct
  misc_feature 1..22: note = chemically synthesized
  source 1..22: mol_type = other DNA
tacacatccctggttgatagca

SEQ ID NO: 64739 - DNA, 22 bp, synthetic construct
  misc_feature 1..22: note = chemically synthesized
  source 1..22: mol_type = other DNA
gttgatagcagtgtgtctggag

SEQ ID NO: 64740 - DNA, 22 bp, synthetic construct
  misc_feature 1..22: note = chemically synthesized
  source 1..22: mol_type = other DNA
atagcagtgtgtctggaggcag

SEQ ID NO: 64741 - DNA, 22 bp, synthetic construct
  misc_feature 1..22: note = chemically synthesized
  source 1..22: mol_type = other DNA
gaggcagaaaccattcttgctt

SEQ ID NO: 64742 - DNA, 22 bp, synthetic construct
  misc_feature 1..22: note = chemically synthesized
  source 1..22: mol_type = other DNA
ttgctttggaaacaattacgtc

SEQ ID NO: 64743 - DNA, 22 bp, synthetic construct
  misc_feature 1..22: note = chemically synthesized
  source 1..22: mol_type = other DNA
gctttggaaacaattacgtctg

SEQ ID NO: 64744 - DNA, 22 bp, synthetic construct
  misc_feature 1..22: note = chemically synthesized
  source 1..22: mol_type = other DNA
ctttggaaacaattacgtctgt

SEQ ID NO: 64745 - DNA, 22 bp, synthetic construct
  misc_feature 1..22: note = chemically synthesized
  source 1..22: mol_type = other DNA
tggaaacaattacgtctgtgtt

SEQ ID NO: 64746 - DNA, 22 bp, synthetic construct
  misc_feature 1..22: note = chemically synthesized
  source 1..22: mol_type = other DNA
ggaaacaattacgtctgtgtta

SEQ ID NO: 64747 - DNA, 22 bp, synthetic construct
  misc_feature 1..22: note = chemically synthesized
  source 1..22: mol_type = other DNA
gaaacaattacgtctgtgttat

SEQ ID NO: 64748 - DNA, 22 bp, synthetic construct
  misc_feature 1..22: note = chemically synthesized
  source 1..22: mol_type = other DNA
cgtctgtgttatactgagtagg

SEQ ID NO: 64749 - DNA, 22 bp, synthetic construct
  misc_feature 1..22: note = chemically synthesized
  source 1..22: mol_type = other DNA
tgttatactgagtagggaagct

SEQ ID NO: 64750 - DNA, 22 bp, synthetic construct
  misc_feature 1..22: note = chemically synthesized
  source 1..22: mol_type = other DNA
tactgagtagggaagctcatta

SEQ ID NO: 64751 - DNA, 22 bp, synthetic construct
  misc_feature 1..22: note = chemically synthesized
  source 1..22: mol_type = other DNA
agtagggaagctcattaattgt

SEQ ID NO: 64752 - DNA, 22 bp, synthetic construct
  misc_feature 1..22: note = chemically synthesized
  source 1..22: mol_type = other DNA
attaattgtcgacacttacgtt

SEQ ID NO: 64753 - DNA, 22 bp, synthetic construct
  misc_feature 1..22: note = chemically synthesized
  source 1..22: mol_type = other DNA
attgtcgacacttacgttcctg

SEQ ID NO: 64754 - DNA, 22 bp, synthetic construct
  misc_feature 1..22: note = chemically synthesized
  source 1..22: mol_type = other DNA
tcgacacttacgttcctgataa

SEQ ID NO: 64755 - DNA, 22 bp, synthetic construct
  misc_feature 1..22: note = chemically synthesized
  source 1..22: mol_type = other DNA
acgttcctgataatgggatcag

SEQ ID NO: 64756 - DNA, 22 bp, synthetic construct
  misc_feature 1..22: note = chemically synthesized
  source 1..22: mol_type = other DNA
cgttcctgataatgggatcagt

SEQ ID NO: 64757 - DNA, 22 bp, synthetic construct
  misc_feature 1..22: note = chemically synthesized
  source 1..22: mol_type = other DNA
ctgataatgggatcagtgtgta

SEQ ID NO: 64758 - DNA, 22 bp, synthetic construct
  misc_feature 1..22: note = chemically synthesized
  source 1..22: mol_type = other DNA
ataatgggatcagtgtgtaatt

SEQ ID NO: 64759 - DNA, 22 bp, synthetic construct
  misc_feature 1..22: note = chemically synthesized
  source 1..22: mol_type = other DNA
ttgtttcgctccagatttctaa

SEQ ID NO: 64760 - DNA, 22 bp, synthetic construct
  misc_feature 1..22: note = chemically synthesized
  source 1..22: mol_type = other DNA
gtttcgctccagatttctaata

SEQ ID NO: 64761 - DNA, 22 bp, synthetic construct
  misc_feature 1..22: note = chemically synthesized
  source 1..22: mol_type = other DNA
tttcgctccagatttctaatac

SEQ ID NO: 64762 - DNA, 22 bp, synthetic construct
  misc_feature 1..22: note = chemically synthesized
  source 1..22: mol_type = other DNA
cgctccagatttctaataccac

SEQ ID NO: 64763 - DNA, 22 bp, synthetic construct
  misc_feature 1..22: note = chemically synthesized
  source 1..22: mol_type = other DNA
gctccagatttctaataccaca

SEQ ID NO: 64764 - DNA, 22 bp, synthetic construct
  misc_feature 1..22: note = chemically synthesized
  source 1..22: mol_type = other DNA
cagatttctaataccacaaaga

SEQ ID NO: 64765 - DNA, 22 bp, synthetic construct
  misc_feature 1..22: note = chemically synthesized
  source 1..22: mol_type = other DNA
ctaataccacaaagaataaatc

SEQ ID NO: 64766 - DNA, 22 bp, synthetic construct
  misc_feature 1..22: note = chemically synthesized
  source 1..22: mol_type = other DNA
taataccacaaagaataaatcc

SEQ ID NO: 64767 - DNA, 22 bp, synthetic construct
  misc_feature 1..22: note = chemically synthesized
  source 1..22: mol_type = other DNA
ataccacaaagaataaatcctt

SEQ ID NO: 64768 - DNA, 22 bp, synthetic construct
  misc_feature 1..22: note = chemically synthesized
  source 1..22: mol_type = other DNA
tcactctgatcaattttgttaa

SEQ ID NO: 64769 - DNA, 22 bp, synthetic construct
  misc_feature 1..22: note = chemically synthesized
  source 1..22: mol_type = other DNA
cactctgatcaattttgttaac

SEQ ID NO: 64770 - DNA, 22 bp, synthetic construct
  misc_feature 1..22: note = chemically synthesized
  source 1..22: mol_type = other DNA
actctgatcaattttgttaact

SEQ ID NO: 64771 - DNA, 22 bp, synthetic construct
  misc_feature 1..22: note = chemically synthesized
  source 1..22: mol_type = other DNA
tgatcaattttgttaacttctc

SEQ ID NO: 64772 - DNA, 22 bp, synthetic construct
  misc_feature 1..22: note = chemically synthesized
  source 1..22: mol_type = other DNA
atcaattttgttaacttctcac

SEQ ID NO: 64773 - DNA, 22 bp, synthetic construct
  misc_feature 1..22: note = chemically synthesized
  source 1..22: mol_type = other DNA
tgttaacttctcacgtgtcttc

SEQ ID NO: 64774 - DNA, 22 bp, synthetic construct
  misc_feature 1..22: note = chemically synthesized
  source 1..22: mol_type = other DNA
gttaacttctcacgtgtcttct

SEQ ID NO: 64775 - DNA, 22 bp, synthetic construct
  misc_feature 1..22: note = chemically synthesized
  source 1..22: mol_type = other DNA
ttaacttctcacgtgtcttctc

SEQ ID NO: 64776 - DNA, 22 bp, synthetic construct
  misc_feature 1..22: note = chemically synthesized
  source 1..22: mol_type = other DNA
acttctcacgtgtcttctctac

SEQ ID NO: 64777 - DNA, 22 bp, synthetic construct
  misc_feature 1..22: note = chemically synthesized
  source 1..22: mol_type = other DNA
ctcacgtgtcttctctacaccc

SEQ ID NO: 64778 - DNA, 22 bp, synthetic construct
  misc_feature 1..22: note = chemically synthesized
  source 1..22: mol_type = other DNA
tcacgtgtcttctctacaccca

SEQ ID NO: 64779 - DNA, 22 bp, synthetic construct
  misc_feature 1..22: note = chemically synthesized
  source 1..22: mol_type = other DNA
acgtgtcttctctacacccagg

SEQ ID NO: 64780 - DNA, 22 bp, synthetic construct
  misc_feature 1..22: note = chemically synthesized
  source 1..22: mol_type = other DNA
ctctacacccagggcaccggtg

SEQ ID NO: 64781 - DNA, 22 bp, synthetic construct
  misc_feature 1..22: note = chemically synthesized
  source 1..22: mol_type = other DNA
tctacacccagggcaccggtga

SEQ ID NO: 64782 - DNA, 22 bp, synthetic construct
  misc_feature 1..22: note = chemically synthesized
  source 1..22: mol_type = other DNA
tacacccagggcaccggtgaat

SEQ ID NO: 64783 - DNA, 22 bp, synthetic construct
  misc_feature 1..22: note = chemically synthesized
  source 1..22: mol_type = other DNA
cacccagggcaccggtgaatcc

SEQ ID NO: 64784 - DNA, 22 bp, synthetic construct
  misc_feature 1..22: note = chemically synthesized
  source 1..22: mol_type = other DNA
tgatggtcaaagttctagatgc

SEQ ID NO: 64785 - DNA, 22 bp, synthetic construct
  misc_feature 1..22: note = chemically synthesized
  source 1..22: mol_type = other DNA
atggtcaaagttctagatgctg

SEQ ID NO: 64786 - DNA, 22 bp, synthetic construct
  misc_feature 1..22: note = chemically synthesized
  source 1..22: mol_type = other DNA
tagatgctgtccgaggcagtcc

SEQ ID NO: 64787 - DNA, 22 bp, synthetic construct
  misc_feature 1..22: note = chemically synthesized
  source 1..22: mol_type = other DNA
gatgctgtccgaggcagtcctg

SEQ ID NO: 64788 - DNA, 22 bp, synthetic construct
  misc_feature 1..22: note = chemically synthesized
  source 1..22: mol_type = other DNA
tccgaggcagtcctgccatcaa

SEQ ID NO: 64789 - DNA, 22 bp, synthetic construct
  misc_feature 1..22: note = chemically synthesized
  source 1..22: mol_type = other DNA
ccatcaatgtggccgtgcatgt

SEQ ID NO: 64790 - DNA, 22 bp, synthetic construct
  misc_feature 1..22: note = chemically synthesized
  source 1..22: mol_type = other DNA
agaaaggctgctgatgacacct

SEQ ID NO: 64791 - DNA, 22 bp, synthetic construct
  misc_feature 1..22: note = chemically synthesized
  source 1..22: mol_type = other DNA
ctgatgacacctgggagccatt

SEQ ID NO: 64792 - DNA, 22 bp, synthetic construct
  misc_feature 1..22: note = chemically synthesized
  source 1..22: mol_type = other DNA
atgacacctgggagccatttgc

SEQ ID NO: 64793 - DNA, 22 bp, synthetic construct
  misc_feature 1..22: note = chemically synthesized
  source 1..22: mol_type = other DNA
ccaggtgtcatcagcagccttt

SEQ ID NO: 64794 - DNA, 22 bp, synthetic construct
  misc_feature 1..22: note = chemically synthesized
  source 1..22: mol_type = other DNA
tctgaacacatgcacggccaca

SEQ ID NO: 64795 - DNA, 22 bp, synthetic construct
  misc_feature 1..22: note = chemically synthesized
  source 1..22: mol_type = other DNA
ctgaacacatgcacggccacat

SEQ ID NO: 64796 - DNA, 22 bp, synthetic construct
  misc_feature 1..22: note = chemically synthesized
  source 1..22: mol_type = other DNA
tgaacacatgcacggccacatt

SEQ ID NO: 64797 - DNA, 22 bp, synthetic construct
  misc_feature 1..22: note = chemically synthesized
  source 1..22: mol_type = other DNA
aacacatgcacggccacattga

SEQ ID NO: 64798 - DNA, 22 bp, synthetic construct
  misc_feature 1..22: note = chemically synthesized
  source 1..22: mol_type = other DNA
atggcaggactgcctcggacag

SEQ ID NO: 64799 - DNA, 22 bp, synthetic construct
  misc_feature 1..22: note = chemically synthesized
  source 1..22: mol_type = other DNA
cctcggacagcatctagaactt

SEQ ID NO: 64800 - DNA, 22 bp, synthetic construct
  misc_feature 1..22: note = chemically synthesized
  source 1..22: mol_type = other DNA
ggacagcatctagaactttgac

SEQ ID NO: 64801 - DNA, 22 bp, synthetic construct
  misc_feature 1..22: note = chemically synthesized
  source 1..22: mol_type = other DNA
gaactttgaccatcagaggaca

SEQ ID NO: 64802 - DNA, 22 bp, synthetic construct
  misc_feature 1..22: note = chemically synthesized
  source 1..22: mol_type = other DNA
tgaccatcagaggacacttgga

SEQ ID NO: 64803 - DNA, 22 bp, synthetic construct
  misc_feature 1..22: note = chemically synthesized
  source 1..22: mol_type = other DNA
gaccatcagaggacacttggat

SEQ ID NO: 64804 - DNA, 22 bp, synthetic construct
  misc_feature 1..22: note = chemically synthesized
  source 1..22: mol_type = other DNA
accatcagaggacacttggatt

SEQ ID NO: 64805 - DNA, 22 bp, synthetic construct
  misc_feature 1..22: note = chemically synthesized
  source 1..22: mol_type = other DNA
ggattcaccggtgccctgggtg

SEQ ID NO: 64806 - DNA, 22 bp, synthetic construct
  misc_feature 1..22: note = chemically synthesized
  source 1..22: mol_type = other DNA
gattcaccggtgccctgggtgt

SEQ ID NO: 64807 - DNA, 22 bp, synthetic construct
  misc_feature 1..22: note = chemically synthesized
  source 1..22: mol_type = other DNA
accggtgccctgggtgtagaga

SEQ ID NO: 64808 - DNA, 22 bp, synthetic construct
  misc_feature 1..22: note = chemically synthesized
  source 1..22: mol_type = other DNA
ggtgtagagaagacacgtgaga

SEQ ID NO: 64809 - DNA, 22 bp, synthetic construct
  misc_feature 1..22: note = chemically synthesized
  source 1..22: mol_type = other DNA
acaaaattgatcagagtgaaag

SEQ ID NO: 64810 - DNA, 22 bp, synthetic construct
  misc_feature 1..22: note = chemically synthesized
  source 1..22: mol_type = other DNA
atcagagtgaaaggatttattc

SEQ ID NO: 64811 - DNA, 22 bp, synthetic construct
  misc_feature 1..22: note = chemically synthesized
  source 1..22: mol_type = other DNA
attctttgtggtattagaaatc

SEQ ID NO: 64812 - DNA, 22 bp, synthetic construct
  misc_feature 1..22: note = chemically synthesized
  source 1..22: mol_type = other DNA
ttctttgtggtattagaaatct

SEQ ID NO: 64813 - DNA, 22 bp, synthetic construct
  misc_feature 1..22: note = chemically synthesized
  source 1..22: mol_type = other DNA
tttgtggtattagaaatctgga

SEQ ID NO: 64814 - DNA, 22 bp, synthetic construct
  misc_feature 1..22: note = chemically synthesized
  source 1..22: mol_type = other DNA
tgtggtattagaaatctggagc

SEQ ID NO: 64815 - DNA, 22 bp, synthetic construct
  misc_feature 1..22: note = chemically synthesized
  source 1..22: mol_type = other DNA
gtggtattagaaatctggagcg

SEQ ID NO: 64816 - DNA, 22 bp, synthetic construct
  misc_feature 1..22: note = chemically synthesized
  source 1..22: mol_type = other DNA
tggtattagaaatctggagcga

SEQ ID NO: 64817 - DNA, 22 bp, synthetic construct
  misc_feature 1..22: note = chemically synthesized
  source 1..22: mol_type = other DNA
gaaatctggagcgaaacaagaa

SEQ ID NO: 64818 - DNA, 22 bp, synthetic construct
  misc_feature 1..22: note = chemically synthesized
  source 1..22: mol_type = other DNA
gagcgaaacaagaattacacac

SEQ ID NO: 64819 - DNA, 22 bp, synthetic construct
  misc_feature 1..22: note = chemically synthesized
  source 1..22: mol_type = other DNA
cacactgatcccattatcagga

SEQ ID NO: 64820 - DNA, 22 bp, synthetic construct
  misc_feature 1..22: note = chemically synthesized
  source 1..22: mol_type = other DNA
atcccattatcaggaacgtaag

SEQ ID NO: 64821 - DNA, 22 bp, synthetic construct
  misc_feature 1..22: note = chemically synthesized
  source 1..22: mol_type = other DNA
tcaggaacgtaagtgtcgacaa

SEQ ID NO: 64822 - DNA, 22 bp, synthetic construct
  misc_feature 1..22: note = chemically synthesized
  source 1..22: mol_type = other DNA
atgagcttccctactcagtata

SEQ ID NO: 64823 - DNA, 22 bp, synthetic construct
  misc_feature 1..22: note = chemically synthesized
  source 1..22: mol_type = other DNA
ccctactcagtataacacagac

SEQ ID NO: 64824 - DNA, 22 bp, synthetic construct
  misc_feature 1..22: note = chemically synthesized
  source 1..22: mol_type = other DNA
cctactcagtataacacagacg

SEQ ID NO: 64825 - DNA, 22 bp, synthetic construct
  misc_feature 1..22: note = chemically synthesized
  source 1..22: mol_type = other DNA
ctcagtataacacagacgtaat

SEQ ID NO: 64826 - DNA, 22 bp, synthetic construct
  misc_feature 1..22: note = chemically synthesized
  source 1..22: mol_type = other DNA
agtataacacagacgtaattgt

SEQ ID NO: 64827 - DNA, 22 bp, synthetic construct
  misc_feature 1..22: note = chemically synthesized
  source 1..22: mol_type = other DNA
tttccaaagcaagaatggtttc

SEQ ID NO: 64828 - DNA, 22 bp, synthetic construct
  misc_feature 1..22: note = chemically synthesized
  source 1..22: mol_type = other DNA
ccaaagcaagaatggtttctgc

SEQ ID NO: 64829 - DNA, 22 bp, synthetic construct
  misc_feature 1..22: note = chemically synthesized
  source 1..22: mol_type = other DNA
caaagcaagaatggtttctgcc

SEQ ID NO: 64830 - DNA, 22 bp, synthetic construct
  misc_feature 1..22: note = chemically synthesized
  source 1..22: mol_type = other DNA
ctgcctccagacacactgctat

SEQ ID NO: 64831 - DNA, 22 bp, synthetic construct
  misc_feature 1..22: note = chemically synthesized
  source 1..22: mol_type = other DNA
tgcctccagacacactgctatc

SEQ ID NO: 64832 - DNA, 22 bp, synthetic construct
  misc_feature 1..22: note = chemically synthesized
  source 1..22: mol_type = other DNA
cctccagacacactgctatcaa

SEQ ID NO: 64833 - DNA, 22 bp, synthetic construct
  misc_feature 1..22: note = chemically synthesized
  source 1..22: mol_type = other DNA
cagacacactgctatcaaccag

SEQ ID NO: 64834 - DNA, 22 bp, synthetic construct
  misc_feature 1..22: note = chemically synthesized
  source 1..22: mol_type = other DNA
ctatcaaccagggatgtgtata

SEQ ID NO: 64835 - DNA, 22 bp, synthetic construct
  misc_feature 1..22: note = chemically synthesized
  source 1..22: mol_type = other DNA
tcaaccagggatgtgtataatg

SEQ ID NO: 64836 - DNA, 22 bp, synthetic construct
  misc_feature 1..22: note = chemically synthesized
  source 1..22: mol_type = other DNA
taagggagaaaataggtcccct

SEQ ID NO: 64837 - DNA, 22 bp, synthetic construct
  misc_feature 1..22: note = chemically synthesized
  source 1..22: mol_type = other DNA
aagggagaaaataggtcccctg

SEQ ID NO: 64838 - DNA, 22 bp, synthetic construct
  misc_feature 1..22: note = chemically synthesized
  source 1..22: mol_type = other DNA
agggagaaaataggtcccctga

SEQ ID NO: 64839 - DNA, 22 bp, synthetic construct
  misc_feature 1..22: note = chemically synthesized
  source 1..22: mol_type = other DNA
agaacagttgctttgttaaaag

SEQ ID NO: 64840 - DNA, 22 bp, synthetic construct
  misc_feature 1..22: note = chemically synthesized
  source 1..22: mol_type = other DNA
ctttgttaaaagtctccatttg

SEQ ID NO: 64841 - DNA, 22 bp, synthetic construct
  misc_feature 1..22: note = chemically synthesized
  source 1..22: mol_type = other DNA
tgttaaaagtctccatttgagt

SEQ ID NO: 64842 - DNA, 22 bp, synthetic construct
  misc_feature 1..22: note = chemically synthesized
  source 1..22: mol_type = other DNA
gttaaaagtctccatttgagtg

SEQ ID NO: 64843 - DNA, 22 bp, synthetic construct
  misc_feature 1..22: note = chemically synthesized
  source 1..22: mol_type = other DNA
ttaaaagtctccatttgagtgg

SEQ ID NO: 64844 - DNA, 22 bp, synthetic construct
  misc_feature 1..22: note = chemically synthesized
  source 1..22: mol_type = other DNA
aaagtctccatttgagtggaat

SEQ ID NO: 64845 - DNA, 22 bp, synthetic construct
  misc_feature 1..22: note = chemically synthesized
  source 1..22: mol_type = other DNA
catttgagtggaattactgaaa

SEQ ID NO: 64846 - DNA, 22 bp, synthetic construct
  misc_feature 1..22: note = chemically synthesized
  source 1..22: mol_type = other DNA
gagtggaattactgaaaagatg

SEQ ID NO: 64847 - DNA, 22 bp, synthetic construct
  misc_feature 1..22: note = chemically synthesized
  source 1..22: mol_type = other DNA
agtggaattactgaaaagatgt

SEQ ID NO: 64848 - DNA, 22 bp, synthetic construct
  misc_feature 1..22: note = chemically synthesized
  source 1..22: mol_type = other DNA
ctgaaaagatgtaatgtaccat

SEQ ID NO: 64849 - DNA, 22 bp, synthetic construct
  misc_feature 1..22: note = chemically synthesized
  source 1..22: mol_type = other DNA
aaaagatgtaatgtaccataca

SEQ ID NO: 64850 - DNA, 22 bp, synthetic construct
  misc_feature 1..22: note = chemically synthesized
  source 1..22: mol_type = other DNA
tcctgagatcattttagttgtt

SEQ ID NO: 64851 - DNA, 22 bp, synthetic construct
  misc_feature 1..22: note = chemically synthesized
  source 1..22: mol_type = other DNA
cctgagatcattttagttgttg

SEQ ID NO: 64852 - DNA, 22 bp, synthetic construct
  misc_feature 1..22: note = chemically synthesized
  source 1..22: mol_type = other DNA
ctgagatcattttagttgttgc

SEQ ID NO: 64853 - DNA, 22 bp, synthetic construct
  misc_feature 1..22: note = chemically synthesized
  source 1..22: mol_type = other DNA
agatcattttagttgttgctat

SEQ ID NO: 64854 - DNA, 22 bp, synthetic construct
  misc_feature 1..22: note = chemically synthesized
  source 1..22: mol_type = other DNA
tagttgttgctatagtcactcc

SEQ ID NO: 64855 - DNA, 22 bp, synthetic construct
  misc_feature 1..22: note = chemically synthesized
  source 1..22: mol_type = other DNA
agttgttgctatagtcactccc

SEQ ID NO: 64856 - DNA, 22 bp, synthetic construct
  misc_feature 1..22: note = chemically synthesized
  source 1..22: mol_type = other DNA
gttgttgctatagtcactccct

SEQ ID NO: 64857 - DNA, 22 bp, synthetic construct
  misc_feature 1..22: note = chemically synthesized
  source 1..22: mol_type = other DNA
ttgctatagtcactccctctta

SEQ ID NO: 64858 - DNA, 22 bp, synthetic construct
  misc_feature 1..22: note = chemically synthesized
  source 1..22: mol_type = other DNA
ctatagtcactccctcttacca

SEQ ID NO: 64859 - DNA, 22 bp, synthetic construct
  misc_feature 1..22: note = chemically synthesized
  source 1..22: mol_type = other DNA
tagtcactccctcttaccagtt

SEQ ID NO: 64860 - DNA, 22 bp, synthetic construct
  misc_feature 1..22: note = chemically synthesized
  source 1..22: mol_type = other DNA
cctcttaccagttgttataaaa

SEQ ID NO: 64861 - DNA, 22 bp, synthetic construct
  misc_feature 1..22: note = chemically synthesized
  source 1..22: mol_type = other DNA
ttaccagttgttataaaataat

SEQ ID NO: 64862 - DNA, 22 bp, synthetic construct
  misc_feature 1..22: note = chemically synthesized
  source 1..22: mol_type = other DNA
accagttgttataaaataatgt

SEQ ID NO: 64863 - DNA, 22 bp, synthetic construct
  misc_feature 1..22: note = chemically synthesized
  source 1..22: mol_type = other DNA
ccagttgttataaaataatgtc

SEQ ID NO: 64864 - DNA, 22 bp, synthetic construct
  misc_feature 1..22: note = chemically synthesized
  source 1..22: mol_type = other DNA
ttataaaataatgtcagaacta

SEQ ID NO: 64865 - DNA, 22 bp, synthetic construct
  misc_feature 1..22: note = chemically synthesized
  source 1..22: mol_type = other DNA
taaaataatgtcagaactacat

SEQ ID NO: 64866 - DNA, 22 bp, synthetic construct
  misc_feature 1..22: note = chemically synthesized
  source 1..22: mol_type = other DNA
catccagacccattttatagta

SEQ ID NO: 64867 - DNA, 22 bp, synthetic construct
  misc_feature 1..22: note = chemically synthesized
  source 1..22: mol_type = other DNA
tatagtattagttaattcttct

SEQ ID NO: 64868 - DNA, 22 bp, synthetic construct
  misc_feature 1..22: note = chemically synthesized
  source 1..22: mol_type = other DNA
atagtattagttaattcttcta

SEQ ID NO: 64869 - DNA, 22 bp, synthetic construct
  misc_feature 1..22: note = chemically synthesized
  source 1..22: mol_type = other DNA
tagtattagttaattcttctag

SEQ ID NO: 64870 - DNA, 22 bp, synthetic construct
  misc_feature 1..22: note = chemically synthesized
  source 1..22: mol_type = other DNA
gttaattcttctagaggattta

SEQ ID NO: 64871 - DNA, 22 bp, synthetic construct
  misc_feature 1..22: note = chemically synthesized
  source 1..22: mol_type = other DNA
attcttctagaggatttaagaa

SEQ ID NO: 64872 - DNA, 22 bp, synthetic construct
  misc_feature 1..22: note = chemically synthesized
  source 1..22: mol_type = other DNA
ttctagaggatttaagaattag

SEQ ID NO: 64873 - DNA, 22 bp, synthetic construct
  misc_feature 1..22: note = chemically synthesized
  source 1..22: mol_type = other DNA
ctagaggatttaagaattagat

SEQ ID NO: 64874 - DNA, 22 bp, synthetic construct
  misc_feature 1..22: note = chemically synthesized
  source 1..22: mol_type = other DNA
tagaggatttaagaattagata

SEQ ID NO: 64875 - DNA, 22 bp, synthetic construct
  misc_feature 1..22: note = chemically synthesized
  source 1..22: mol_type = other DNA
gaggatttaagaattagatatc

SEQ ID NO: 64876 - DNA, 22 bp, synthetic construct
  misc_feature 1..22: note = chemically synthesized
  source 1..22: mol_type = other DNA
aagaattagatatctgactaga

SEQ ID NO: 64877 - DNA, 22 bp, synthetic construct
  misc_feature 1..22: note = chemically synthesized
  source 1..22: mol_type = other DNA
agaattagatatctgactagaa

SEQ ID NO: 64878 - DNA, 22 bp, synthetic construct
  misc_feature 1..22: note = chemically synthesized
  source 1..22: mol_type = other DNA
gatatctgactagaatattgtt

SEQ ID NO: 64879 - DNA, 22 bp, synthetic construct
  misc_feature 1..22: note = chemically synthesized
  source 1..22: mol_type = other DNA
actagaatattgttcactaagc

SEQ ID NO: 64880 - DNA, 22 bp, synthetic construct
  misc_feature 1..22: note = chemically synthesized
  source 1..22: mol_type = other DNA
gaatattgttcactaagccttt

SEQ ID NO: 64881 - DNA, 22 bp, synthetic construct
  misc_feature 1..22: note = chemically synthesized
  source 1..22: mol_type = other DNA
ttcactaagccttttaaagatt

SEQ ID NO: 64882 - DNA, 22 bp, synthetic construct
  misc_feature 1..22: note = chemically synthesized
  source 1..22: mol_type = other DNA
actaagccttttaaagattaat

SEQ ID NO: 64883 - DNA, 22 bp, synthetic construct
  misc_feature 1..22: note = chemically synthesized
  source 1..22: mol_type = other DNA
agccttttaaagattaatcaat

SEQ ID NO: 64884 - DNA, 22 bp, synthetic construct
  misc_feature 1..22: note = chemically synthesized
  source 1..22: mol_type = other DNA
ttaaagattaatcaataaatac

SEQ ID NO: 64885 - DNA, 22 bp, synthetic construct
  misc_feature 1..22: note = chemically synthesized
  source 1..22: mol_type = other DNA
taaagattaatcaataaatacg

SEQ ID NO: 64886 - DNA, 22 bp, synthetic construct
  misc_feature 1..22: note = chemically synthesized
  source 1..22: mol_type = other DNA
aaagattaatcaataaatacgt

SEQ ID NO: 64887 - DNA, 22 bp, synthetic construct
  misc_feature 1..22: note = chemically synthesized
  source 1..22: mol_type = other DNA
aagattaatcaataaatacgtt

SEQ ID NO: 64888 - DNA, 22 bp, synthetic construct
  misc_feature 1..22: note = chemically synthesized
  source 1..22: mol_type = other DNA
atcaataaatacgttttgaata

SEQ ID NO: 64889 - DNA, 22 bp, synthetic construct
  misc_feature 1..22: note = chemically synthesized
  source 1..22: mol_type = other DNA
tgaataactatagggccagaat

SEQ ID NO: 64890 - DNA, 22 bp, synthetic construct
  misc_feature 1..22: note = chemically synthesized
  source 1..22: mol_type = other DNA
gaataactatagggccagaata

SEQ ID NO: 64891 - DNA, 22 bp, synthetic construct
  misc_feature 1..22: note = chemically synthesized
  source 1..22: mol_type = other DNA
aataactatagggccagaatat

SEQ ID NO: 64892 - DNA, 22 bp, synthetic construct
  misc_feature 1..22: note = chemically synthesized
  source 1..22: mol_type = other DNA
tagggccagaatataatctcct

SEQ ID NO: 64893 - DNA, 22 bp, synthetic construct
  misc_feature 1..22: note = chemically synthesized
  source 1..22: mol_type = other DNA
ctgcagtttgtcccccaaatac

SEQ ID NO: 64894 - DNA, 22 bp, synthetic construct
  misc_feature 1..22: note = chemically synthesized
  source 1..22: mol_type = other DNA
cagtttgtcccccaaatacatt

SEQ ID NO: 64895 - DNA, 22 bp, synthetic construct
  misc_feature 1..22: note = chemically synthesized
  source 1..22: mol_type = other DNA
gtcccccaaatacattttatgg

SEQ ID NO: 64896 - DNA, 22 bp, synthetic construct
  misc_feature 1..22: note = chemically synthesized
  source 1..22: mol_type = other DNA
tcccccaaatacattttatgga

SEQ ID NO: 64897 - DNA, 22 bp, synthetic construct
  misc_feature 1..22: note = chemically synthesized
  source 1..22: mol_type = other DNA
tatggagggatacttttctgaa

SEQ ID NO: 64898 - DNA, 22 bp, synthetic construct
  misc_feature 1..22: note = chemically synthesized
  source 1..22: mol_type = other DNA
atggagggatacttttctgaaa

SEQ ID NO: 64899 - DNA, 22 bp, synthetic construct
  misc_feature 1..22: note = chemically synthesized
  source 1..22: mol_type = other DNA
tggagggatacttttctgaaaa

SEQ ID NO: 64900 - DNA, 22 bp, synthetic construct
  misc_feature 1..22: note = chemically synthesized
  source 1..22: mol_type = other DNA
ttctgaaaattcagtattaaca

SEQ ID NO: 64901 - DNA, 22 bp, synthetic construct
  misc_feature 1..22: note = chemically synthesized
  source 1..22: mol_type = other DNA
tctgaaaattcagtattaacag

SEQ ID NO: 64902 - DNA, 22 bp, synthetic construct
  misc_feature 1..22: note = chemically synthesized
  source 1..22: mol_type = other DNA
ctgaaaattcagtattaacagc

SEQ ID NO: 64903 - DNA, 22 bp, synthetic construct
  misc_feature 1..22: note = chemically synthesized
  source 1..22: mol_type = other DNA
tgaaaattcagtattaacagct

SEQ ID NO: 64904 - DNA, 22 bp, synthetic construct
  misc_feature 1..22: note = chemically synthesized
  source 1..22: mol_type = other DNA
aaaattcagtattaacagcttc

SEQ ID NO: 64905 - DNA, 22 bp, synthetic construct
  misc_feature 1..22: note = chemically synthesized
  source 1..22: mol_type = other DNA
agtattaacagcttccttaata

SEQ ID NO: 64906 - DNA, 22 bp, synthetic construct
  misc_feature 1..22: note = chemically synthesized
  source 1..22: mol_type = other DNA
acagcttccttaatatcatatc

SEQ ID NO: 64907 - DNA, 22 bp, synthetic construct
  misc_feature 1..22: note = chemically synthesized
  source 1..22: mol_type = other DNA
ccttaatatcatatctttattt

SEQ ID NO: 64908 - DNA, 22 bp, synthetic construct
  misc_feature 1..22: note = chemically synthesized
  source 1..22: mol_type = other DNA
cttaatatcatatctttatttc

SEQ ID NO: 64909 - DNA, 22 bp, synthetic construct
  misc_feature 1..22: note = chemically synthesized
  source 1..22: mol_type = other DNA
aatatcatatctttatttctat

SEQ ID NO: 64910 - DNA, 22 bp, synthetic construct
  misc_feature 1..22: note = chemically synthesized
  source 1..22: mol_type = other DNA
atatcatatctttatttctatc

SEQ ID NO: 64911 - DNA, 22 bp, synthetic construct
  misc_feature 1..22: note = chemically synthesized
  source 1..22: mol_type = other DNA
tatttctatcatctatctgagg

SEQ ID NO: 64912 - DNA, 22 bp, synthetic construct
  misc_feature 1..22: note = chemically synthesized
  source 1..22: mol_type = other DNA
atttctatcatctatctgagga

SEQ ID NO: 64913 - DNA, 22 bp, synthetic construct
  misc_feature 1..22: note = chemically synthesized
  source 1..22: mol_type = other DNA
tttctatcatctatctgaggaa

SEQ ID NO: 64914 - DNA, 22 bp, synthetic construct
  misc_feature 1..22: note = chemically synthesized
  source 1..22: mol_type = other DNA
ctatcatctatctgaggaaaca

SEQ ID NO: 64915 - DNA, 22 bp, synthetic construct
  misc_feature 1..22: note = chemically synthesized
  source 1..22: mol_type = other DNA
tatcatctatctgaggaaacag

SEQ ID NO: 64916 - DNA, 22 bp, synthetic construct
  misc_feature 1..22: note = chemically synthesized
  source 1..22: mol_type = other DNA
tcatctatctgaggaaacagag

SEQ ID NO: 64917 - DNA, 22 bp, synthetic construct
  misc_feature 1..22: note = chemically synthesized
  source 1..22: mol_type = other DNA
tctgaggaaacagaggtaccag

SEQ ID NO: 64918 - DNA, 22 bp, synthetic construct
  misc_feature 1..22: note = chemically synthesized
  source 1..22: mol_type = other DNA
aggaaacagaggtaccagatat

SEQ ID NO: 64919 - DNA, 22 bp, synthetic construct
  misc_feature 1..22: note = chemically synthesized
  source 1..22: mol_type = other DNA
caaacctaatgcaccaaagcaa

SEQ ID NO: 64920 - DNA, 22 bp, synthetic construct
  misc_feature 1..22: note = chemically synthesized
  source 1..22: mol_type = other DNA
atgcaccaaagcaatgaggtag

SEQ ID NO: 64921 - DNA, 22 bp, synthetic construct
  misc_feature 1..22: note = chemically synthesized
  source 1..22: mol_type = other DNA
agagttcaagtcccagctcagt

SEQ ID NO: 64922 - DNA, 22 bp, synthetic construct
  misc_feature 1..22: note = chemically synthesized
  source 1..22: mol_type = other DNA
aagtcccagctcagtaagctca

SEQ ID NO: 64923 - DNA, 22 bp, synthetic construct
  misc_feature 1..22: note = chemically synthesized
  source 1..22: mol_type = other DNA
agtaagctcagtggaacttcat

SEQ ID NO: 64924 - DNA, 22 bp, synthetic construct
  misc_feature 1..22: note = chemically synthesized
  source 1..22: mol_type = other DNA
agtggaacttcattctttttga

SEQ ID NO: 64925 - DNA, 22 bp, synthetic construct
  misc_feature 1..22: note = chemically synthesized
  source 1..22: mol_type = other DNA
cattctttttgaagtttgaatt

SEQ ID NO: 64926 - DNA, 22 bp, synthetic construct
  misc_feature 1..22: note = chemically synthesized
  source 1..22: mol_type = other DNA
attctttttgaagtttgaatta

SEQ ID NO: 64927 - DNA, 22 bp, synthetic construct
  misc_feature 1..22: note = chemically synthesized
  source 1..22: mol_type = other DNA
tttttgaagtttgaattaatta

SEQ ID NO: 64928 - DNA, 22 bp, synthetic construct
  misc_feature 1..22: note = chemically synthesized
  source 1..22: mol_type = other DNA
tttgaagtttgaattaattata

SEQ ID NO: 64929 - DNA, 22 bp, synthetic construct
  misc_feature 1..22: note = chemically synthesized
  source 1..22: mol_type = other DNA
ttgaagtttgaattaattatat

SEQ ID NO: 64930 - DNA, 22 bp, synthetic construct
  misc_feature 1..22: note = chemically synthesized
  source 1..22: mol_type = other DNA
tgaagtttgaattaattatatt

SEQ ID NO: 64931 - DNA, 22 bp, synthetic construct
  misc_feature 1..22: note = chemically synthesized
  source 1..22: mol_type = other DNA
gaagtttgaattaattatatta

SEQ ID NO: 64932 - DNA, 22 bp, synthetic construct
  misc_feature 1..22: note = chemically synthesized
  source 1..22: mol_type = other DNA
aagtttgaattaattatattaa

SEQ ID NO: 64933 - DNA, 22 bp, synthetic construct
  misc_feature 1..22: note = chemically synthesized
  source 1..22: mol_type = other DNA
gaattaattatattaaaaatag

SEQ ID NO: 64934 - DNA, 22 bp, synthetic construct
  misc_feature 1..22: note = chemically synthesized
  source 1..22: mol_type = other DNA
aattaattatattaaaaataga

SEQ ID NO: 64935 - DNA, 22 bp, synthetic construct
  misc_feature 1..22: note = chemically synthesized
  source 1..22: mol_type = other DNA
attatattaaaaatagatgctg

SEQ ID NO: 64936 - DNA, 22 bp, synthetic construct
  misc_feature 1..22: note = chemically synthesized
  source 1..22: mol_type = other DNA
tattaaaaatagatgctgggta

SEQ ID NO: 64937 - DNA, 22 bp, synthetic construct
  misc_feature 1..22: note = chemically synthesized
  source 1..22: mol_type = other DNA
aaaatagatgctgggtaccctt

SEQ ID NO: 64938 - DNA, 22 bp, synthetic construct
  misc_feature 1..22: note = chemically synthesized
  source 1..22: mol_type = other DNA
ggtacccttgccctagtaataa

SEQ ID NO: 64939 - DNA, 22 bp, synthetic construct
  misc_feature 1..22: note = chemically synthesized
  source 1..22: mol_type = other DNA
gccctagtaataaaagctggtt

SEQ ID NO: 64940 - DNA, 22 bp, synthetic construct
  misc_feature 1..22: note = chemically synthesized
  source 1..22: mol_type = other DNA
ccctagtaataaaagctggttg

SEQ ID NO: 64941 - DNA, 22 bp, synthetic construct
  misc_feature 1..22: note = chemically synthesized
  source 1..22: mol_type = other DNA
gtaataaaagctggttggcaaa

SEQ ID NO: 64942 - DNA, 22 bp, synthetic construct
  misc_feature 1..22: note = chemically synthesized
  source 1..22: mol_type = other DNA
gttggcaaagctggaaggagtc

SEQ ID NO: 64943 - DNA, 22 bp, synthetic construct
  misc_feature 1..22: note = chemically synthesized
  source 1..22: mol_type = other DNA
gcaaagctggaaggagtcactt

SEQ ID NO: 64944 - DNA, 22 bp, synthetic construct
  misc_feature 1..22: note = chemically synthesized
  source 1..22: mol_type = other DNA
gaaggagtcacttctacttcat

SEQ ID NO: 64945 - DNA, 22 bp, synthetic construct
  misc_feature 1..22: note = chemically synthesized
  source 1..22: mol_type = other DNA
ctacttcatttagcgtgaatct

SEQ ID NO: 64946 - DNA, 22 bp, synthetic construct
  misc_feature 1..22: note = chemically synthesized
  source 1..22: mol_type = other DNA
tacttcatttagcgtgaatctt

SEQ ID NO: 64947 - DNA, 22 bp, synthetic construct
  misc_feature 1..22: note = chemically synthesized
  source 1..22: mol_type = other DNA
cttcatttagcgtgaatcttaa

SEQ ID NO: 64948 - DNA, 22 bp, synthetic construct
  misc_feature 1..22: note = chemically synthesized
  source 1..22: mol_type = other DNA
catttagcgtgaatcttaaatg

SEQ ID NO: 64949 - DNA, 22 bp, synthetic construct
  misc_feature 1..22: note = chemically synthesized
  source 1..22: mol_type = other DNA
atttagcgtgaatcttaaatgt

SEQ ID NO: 64950 - DNA, 22 bp, synthetic construct
  misc_feature 1..22: note = chemically synthesized
  source 1..22: mol_type = other DNA
agcgtgaatcttaaatgtagga

SEQ ID NO: 64951 - DNA, 22 bp, synthetic construct
  misc_feature 1..22: note = chemically synthesized
  source 1..22: mol_type = other DNA
gcgtgaatcttaaatgtaggaa

SEQ ID NO: 64952 - DNA, 22 bp, synthetic construct
  misc_feature 1..22: note = chemically synthesized
  source 1..22: mol_type = other DNA
aaatgtaggaatgggatgtcac

SEQ ID NO: 64953 - DNA, 22 bp, synthetic construct
  misc_feature 1..22: note = chemically synthesized
  source 1..22: mol_type = other DNA
aatgtaggaatgggatgtcaca

SEQ ID NO: 64954 - DNA, 22 bp, synthetic construct
  misc_feature 1..22: note = chemically synthesized
  source 1..22: mol_type = other DNA
accgtagggccagcctcagaca

SEQ ID NO: 64955 - DNA, 22 bp, synthetic construct
  misc_feature 1..22: note = chemically synthesized
  source 1..22: mol_type = other DNA
agacacaaataccagtccagca

SEQ ID NO: 64956 - DNA, 22 bp, synthetic construct
  misc_feature 1..22: note = chemically synthesized
  source 1..22: mol_type = other DNA
ccaagaatgagtggacttctgt

SEQ ID NO: 64957 - DNA, 22 bp, synthetic construct
  misc_feature 1..22: note = chemically synthesized
  source 1..22: mol_type = other DNA
ctgtgatggctgctcccagcct

SEQ ID NO: 64958 - DNA, 22 bp, synthetic construct
  misc_feature 1..22: note = chemically synthesized
  source 1..22: mol_type = other DNA
tgtgatggctgctcccagcctg

SEQ ID NO: 64959 - DNA, 22 bp, synthetic construct
  misc_feature 1..22: note = chemically synthesized
  source 1..22: mol_type = other DNA
tgatggctgctcccagcctggg

SEQ ID NO: 64960 - DNA, 22 bp, synthetic construct
  misc_feature 1..22: note = chemically synthesized
  source 1..22: mol_type = other DNA
ctcccagcctggggcttttata

SEQ ID NO: 64961 - DNA, 22 bp, synthetic construct
  misc_feature 1..22: note = chemically synthesized
  source 1..22: mol_type = other DNA
ccagcctggggcttttatactc

SEQ ID NO: 64962 - DNA, 22 bp, synthetic construct
  misc_feature 1..22: note = chemically synthesized
  source 1..22: mol_type = other DNA
gggcttttatactcacttctcc

SEQ ID NO: 64963 - DNA, 22 bp, synthetic construct
  misc_feature 1..22: note = chemically synthesized
  source 1..22: mol_type = other DNA
ttatactcacttctcctgagct

SEQ ID NO: 64964 - DNA, 22 bp, synthetic construct
  misc_feature 1..22: note = chemically synthesized
  source 1..22: mol_type = other DNA
tatactcacttctcctgagcta

SEQ ID NO: 64965 - DNA, 22 bp, synthetic construct
  misc_feature 1..22: note = chemically synthesized
  source 1..22: mol_type = other DNA
atactcacttctcctgagctag

SEQ ID NO: 64966 - DNA, 22 bp, synthetic construct
  misc_feature 1..22: note = chemically synthesized
  source 1..22: mol_type = other DNA
tactcacttctcctgagctagg

SEQ ID NO: 64967 - DNA, 22 bp, synthetic construct
  misc_feature 1..22: note = chemically synthesized
  source 1..22: mol_type = other DNA
acttctcctgagctaggctgct

SEQ ID NO: 64968 - DNA, 22 bp, synthetic construct
  misc_feature 1..22: note = chemically synthesized
  source 1..22: mol_type = other DNA
ctcctgagctaggctgcttatc

SEQ ID NO: 64969 - DNA, 22 bp, synthetic construct
  misc_feature 1..22: note = chemically synthesized
  source 1..22: mol_type = other DNA
tcctgagctaggctgcttatcc

SEQ ID NO: 64970 - DNA, 22 bp, synthetic construct
  misc_feature 1..22: note = chemically synthesized
  source 1..22: mol_type = other DNA
ctgagctaggctgcttatccct

SEQ ID NO: 64971 - DNA, 22 bp, synthetic construct
  misc_feature 1..22: note = chemically synthesized
  source 1..22: mol_type = other DNA
agctaggctgcttatccctgcc

SEQ ID NO: 64972 - DNA, 22 bp, synthetic construct
  misc_feature 1..22: note = chemically synthesized
  source 1..22: mol_type = other DNA
ggctgcttatccctgccaatct

SEQ ID NO: 64973 - DNA, 22 bp, synthetic construct
  misc_feature 1..22: note = chemically synthesized
  source 1..22: mol_type = other DNA
cttatccctgccaatctgactg

SEQ ID NO: 64974 - DNA, 22 bp, synthetic construct
  misc_feature 1..22: note = chemically synthesized
  source 1..22: mol_type = other DNA
atccctgccaatctgactgcaa

SEQ ID NO: 64975 - DNA, 22 bp, synthetic construct
  misc_feature 1..22: note = chemically synthesized
  source 1..22: mol_type = other DNA
tccctgccaatctgactgcaaa

SEQ ID NO: 64976 - DNA, 22 bp, synthetic construct
  misc_feature 1..22: note = chemically synthesized
  source 1..22: mol_type = other DNA
ccaatctgactgcaaacctgct

SEQ ID NO: 64977 - DNA, 22 bp, synthetic construct
  misc_feature 1..22: note = chemically synthesized
  source 1..22: mol_type = other DNA
actgcaaacctgctgattctga

SEQ ID NO: 64978 - DNA, 22 bp, synthetic construct
  misc_feature 1..22: note = chemically synthesized
  source 1..22: mol_type = other DNA
caaacctgctgattctgattat

SEQ ID NO: 64979 - DNA, 22 bp, synthetic construct
  misc_feature 1..22: note = chemically synthesized
  source 1..22: mol_type = other DNA
ctgattctgattattgacttag

SEQ ID NO: 64980 - DNA, 22 bp, synthetic construct
  misc_feature 1..22: note = chemically synthesized
  source 1..22: mol_type = other DNA
attctgattattgacttagtca

SEQ ID NO: 64981 - skipped

SEQ ID NO: 64982 - protein, 9 aa, unidentified
  REGION 1..9: note = Description of Unknown: Homing endonuclease sequence
LAGLIDADG

SEQ ID NO: 64983 - RNA, 100 nt, synthetic construct
  misc_feature 1..100: note = chemically synthesized
  variation 1..20: note = n is a, c, g, or u
  variation 1..20: note = n is a, c, g, u, or other
  source 1..100: mol_type = other RNA
nnnnnnnnnnnnnnnnnnnngttttagagctagaaatagcaagttaaaataaggctagtccgttatcaacttgaaaaagtggcaccgagtcggtgctttt

SEQ ID NO: 64984 - RNA, 100 nt, synthetic construct; identical to SEQ ID NO: 64983
  misc_feature 1..100: note = chemically synthesized
  modified_base 1..3: mod_base = OTHER; note = 2'-O-methyl phosphorothioate nucleotides
  variation 1..20: note = n is a, c, g, or u
  variation 4..20: note = n is a, c, g, u, or other
  modified_base 98..100: mod_base = OTHER; note = 2'-O-methyl phosphorothioate uracil
  source 1..100: mol_type = other RNA
  variation 1..3: note = where n is a, c, g, u, or other

SEQ ID NO: 64985 - RNA, 96 nt, synthetic construct
  misc_feature 1..96: note = chemically synthesized
  variation 1..20: note = n is a, c, g, u, or other
  variation 1..20: note = n is a, c, g, or u
  source 1..96: mol_type = other RNA
nnnnnnnnnnnnnnnnnnnngttttagagctagaaatagcaagttaaaataaggctagtccgttatcaacttgaaaaagtggcaccgagtcggtgc

SEQ ID NO: 64986 - RNA, 114 nt, synthetic construct
  misc_feature 1..114: note = chemically synthesized
  variation 1..30: note = n is a, c, g, u, or other and this region may encompass 17-30 nucleotides;
  variation 1..30: note = n is a, c, g, or u
  variation 107..114: note = This region may encompass 1-8 uracil;
  source 1..114: mol_type = other RNA
nnnnnnnnnnnnnnnnnnnnnnnnnnnnnngttttagagctagaaatagcaagttaaaataaggctagtccgttatcaacttgaaaaagtggcaccgagtcggtgctttttttt

SEQ ID NO: 64987 - RNA, 114 nt, synthetic construct; identical to SEQ ID NO: 64986
  misc_feature 1..114: note = chemically synthesized
  variation 1..30: note = n is a, c, g, u, or other and this region may encompass 17-30 nucleotides
  variation 1..30: note = n is a, c, g, or u
  variation 107..114: note = This region may encompass 1-8 uracil
  source 1..114: mol_type = other RNA
  modified_base 1..30: mod_base = OTHER; note = nucleotides 1-3 are 2'-O-methyl phosphorothioate nucleotides;
  modified_base 107..114: mod_base = OTHER; note = the last 3 urasil are 2'-O-methyl phosphorothioate nucleotides;
